(19) United States
(12) Patent Application Publication
(10) Pub. No.: US 2015/0284795 A1
(43) Pub. Date: Oct. 8, 2015

(54) Method for determining age independently of sex

(71) Applicants: Eugenia MAKRANTONAKI, (US); Christos C. ZOUBOULIS, Berlin (DE)

(72) Inventors: Eugenia Makranrantonaki, Wildeshausen (DE); Christos C. Zouboulis, Berlin (DE); James Adjaye, Dusseldorf (DE)

(21) Appl. No.: 14/439,639

(22) PCT Filed: Nov. 1, 2013
(86) PCT No.: PCT/EP2013/072878

§ 371 Date: Apr. 29, 2015

(30) Foreign Application Priority Data
Nov. 1, 2012 (DE) 10 2012 110 469.7

(51) Int. Cl. C12Q 1/68; G01N 33/68

(52) U.S. Cl. CPC C12Q 1/6876; G01N 33/6881; C12Q 2600/16; C12Q 2600/124

(57) ABSTRACT

The present invention relates to a method for the determination of the aging condition of a subject. The method allows conclusions on the age and age-related conditions of a subject—also regardless of gender-based on specific nucleic acids or proteins and the expression level thereof. The present invention relates further to a group of genes, which expression level is dependent from the aging condition of the respective subject—also regardless of gender. Furthermore, the present invention relates to the determination of the expression level of the genes, as well as to the use of the respective expression levels for the determination of aging conditions. This invention also relates to devices, particularly arrays and chips, which can be applied for the determination of the aging condition of a subject.

[0001] The present invention relates to a method for the determination of the aging condition of a subject. The method allows drawing conclusions on the age and age-related conditions of a subject—also regardless of the gender-, based on particular nucleic acids or proteins and the expression levels thereof. In the context of this invention, age-related conditions particularly can be age-associated diseases.

[0002] The present invention also relates to a group of genes the expression levels thereof—also regardless of the gender—being depended on the aging condition of the respective subject. Furthermore, the invention relates to the determination of the expression level of the genes and the use of the respective expression levels for the determination of aging conditions.

[0003] The invention also relates to devices, particularly arrays and chips, which can be used for the determination of the aging condition of a subject.

[0004] In today's opinion, aging is a complex multifactorial process that is subject to both hereditary and external influences. The exact mechanisms of aging are not known. However, there are several theories about aging mechanisms, which are not necessarily mutually exclusive, but can quite have an impact on the overall process of aging as parallel or sequential processes in terms of a multifactorial genesis. These theories include on the one hand changes of the genetic information and its structure, like, for example, a progressive shortening of the telomeres, chromosomal abnormalities and increased occurrence of mutations caused or accompanied by a reduced capacity for DNA repair. On the other hand, it is believed that oxidative stress, also associated with dysfunctions of mitochondria, and a higher incidence of misfolded proteins triggered by a reduction of the protein folding capacity and/or a reduction of the degradation of misfolded proteins, are associated with aging. However, it is still not known whether these observed effects are reason or consequence of aging.

[0005] Due to the increasing life expectancy it is to be expected that in the future age-related phenomena will be of increased importance to society. Therefore, there are made great worldwide efforts to determine more closely the influence of various factors on aging and to find possible aging-slowing influences and preventive measures for age-associated diseases, respectively. Thereby, a determination of the progression of aging and healthy aging, respectively, based on objective, well-defined and reproducibly determinable parameters is of central importance for the study of influences on aging. These parameters must differ in different aging conditions in at least one measurable property.

[0006] From WO 2010/104573 A1 already a method is known according to which particular genes are to be identified, which can be used for the determination of the age of a subject. The determination of the aging condition according to the method described therein, however, is very difficult as the samples on which the method is to be carried out are difficult to access and partially require surgical intervention. The determination of the aging condition according to the method described therein is therefore very difficult.

[0007] In the state of the art, no method is known according to which the aging condition of a subject can be determined easily and with a reasonable confidence. It is also not known from the state of the art, to what extend the expression levels of particular biomarkers show gender-specific differences. It is, however, of immense importance for the use of genes as biomarkers that a gender-independent determination of the aging condition of a subject is possible. This is not the case, if the respective gene is suitable as biomarker for one of the genders only. In the previously known biomarkers for aging the situation is even more unfavorable, as it is not even known whether they can be used gender-independently. As a result, misinterpretations of the collected data may occur.

[0008] It is therefore an object of the present invention to provide a method, which allows for a reliable and fast, also gender-independent, determination of the aging condition of a subject. In addition, it is an object of the present invention to allow for a reliable and fast, also gender-independent, determination of the healthy aging condition of a subject, so that individual variations, which may lead to diseases can be determined. The object is solved by a method comprising the following steps:
[0009] a. providing a cell sample of a subject,
[0010] b. determining the expression level of at least one gene in the cell sample, whose expression level in said cell sample is dependent on the aging condition of the subject,
[0011] c. comparing the expression level of the gene with at least one comparison value, wherein the comparison value is the expression level of the respective gene in a control sample and wherein the aging condition of the control sample is known.

[0012] As subjects whose cells are suitable for providing a cell sample, living beings, particularly animals, are possible. Preferred subjects are mammals, a preferred subject is man.

[0013] “Expression level” according to the invention refers to the content of gene product of a particular gene per cell. The gene product may be present both in the form of RNA or in the form of proteins. The determination of the expression level can therefore comprise determining the amount of a protein or nucleic acid, particularly RNA.

[0014] “Aging condition” according to the invention, preferably refers to the postnatal age of the subject. In cell samples from cell cultures, preferably the number of passages in the respective culture is regarded as the aging condition. The aging condition can also be the presence of an age-associated disease or another age-associated condition. Age-associated diseases particularly are cancerous diseases, however, also auto-immune diseases, e.g. bullous dermatoses, lupus erythematosus, infectious diseases, e.g. erysipelas, urinary tract infection, pneumonia, zoster, metabolic diseases, e.g. metabolic syndrome, vascular diseases, e.g. chronic venous insufficiency, arterial occlusive disease, neurodegenerative diseases, e.g. Alzheimer's disease, Parkinson's disease, musculoskeletal disorders, e.g. osteoporosis, diseases of internal organs, e.g. coronary heart disease, COPD, precancerosis and tumors of the skin, e.g. actinic keratoses, basal cell carcinoma, squamous cell carcinoma, leg ulcers (open leg).

[0015] The comparison value according to the present invention preferably is determined by determining the expression levels in cell samples of subjects having known aging condition. For example, the comparison value may be determined by examining a group of at least 2, preferably at least 5 and particular preferably at least 10 comparison subjects with regard to the expression level of the considered gene or the considered genes (control sample). Accordingly, the same steps a and b are preformed with the comparison subjects as for the subject, which is to be examined. The result returns the comparison value and allows a relative statement regarding the aging condition of the examined subject. It is apparent, that hereby a statement is possible with regard to almost any aging condition. The comparison subject or the comparison subjects, respectively, preferably belong to the same species, as the subject to be examined.

[0016] In a preferred embodiment the cell sample is a fixed animal tissue, particularly a skin sample, a saliva sample, a smear cell sample, a blood sample, a urine sample or a stool sample. In a preferred embodiment of the invention the cell sample comprises at least one homogenate of cells. The cell sample can be obtained subsequent to appropriate preparation, from cell- or tissue cultures or from tissues of living organisms, particularly from a skin sample, a saliva sample, a smear cell sample, a blood sample, a urine sample or a stool sample.

[0017] According to the present invention, both cells having a female and cells having a male genotype are useful as cell samples. According to the present invention, preparations of the skin, preparations of the mucous membrane, a smear cell sample, a blood sample or a urine sample can be used as cell samples. This is of particular advantage, as skin, oral, genital and anal mucous membrane, blood, urine and stool are easily accessible for sampling in general. In connection therewith, non-sun-exposed skin areas are particularly useful as cell sample, as the aging there is proceeding largely independent from external factors. Non-sun-exposed skin areas typically are the inner side of the upper arm or the inner side of the thigh, and the buttocks.

[0018] The aging condition of the skin allows conclusions about the aging condition of all other tissues being being subject to aging. Particularly, the aging condition of the skin allows conclusions on the aging condition of other tissues of ectodermal origin. Tissues of ectodermal origin in accordance with the present invention preferably are the central nervous system, the peripheral nervous system, teeth, hair and nails.

[0019] The aging condition of the skin, the mucous membrane, the blood, the urine and the stool allows conclusions on the aging condition of all other tissues being subject to aging.

[0020] In dead organisms cell samples can be used from any tissue for the determination of the aging condition.

[0021] The comparison of the expression level of the gene with at least one comparison value, wherein the comparison value is the expression level of the respective gene in a control sample, and wherein the aging condition of the control sample is known, is carried out to determine any matches or differences of the expression level measured in the cell sample and the expression level of the comparison value.

[0022] The present invention comprises a group of genes having an age-related change in expression, and their use as biomarker for aging and/or age-associated conditions. The determination of the expression level, thereby can be performed with the method known to the person skilled in the art, both at the RNA- or the protein-level.

[0023] Preferred methods for determining the expression levels are Northern blotting, RNase protection, real-time PCR, macro- and microarrays, SILAC, label-free absolute quantification, Western blotting, ELISA, immunocytochemistry and immunohistochemistry.

[0024] For the determination of the level of expression at the RNA level, preferably classic electrophoretic methods are to be used. These particularly are Northern blotting, RNase protection, more preferably PCR-based methods like real-time PCR. Still more preferably, hybridization procedures like macro- and microarrays are to be used. A particularly preferred method is the real-time PCR.

[0025] For the determination of the expression level at protein level, preferably mass spectrometric methods are to be used. These particularly are SILAC and label-free absolute quantification. Particularly preferred antibody-based methods like Western blotting, ELISA and immunocytochemistry and immunohistochemistry are to be used. A particularly preferred method is the immunohistochemistry.

[0026] A preferred application of the invention is the analysis of the effect of cosmetic and medicinal products on the aging condition, particularly the skin aging. For this purpose, for example, products slowing the aging can be applied to defined areas of the skin, and the effect can be compared using the analysis of the gene expression of the described genes on the treated and untreated sites. Predispositions for particular age-related diseases may also be identified.

[0027] A further preferred application of the invention is the analysis of the influence of medical products to the aging of particular tissues or the whole organism. For this purpose, for example, products slowing the aging of particular tissues or of the whole organism can be taken systemically and the effect can be compared using the analysis of the gene expression of the described genes in cell samples of the skin before and after the taking of the medical product. Predispositions for particular age-related diseases can also be identified.

[0028] A further preferred application is the analysis, for example, of traces fount at crime scenes, which allows for a restriction of the age of the offender and thus may restrict the number of possible suspects. It is known to the respective person skilled in the art that often skin scales or other tissue of the offender can be secured at the crime scene, which then may be used for a respective analysis in the purposes of the invention.

[0029] A further possible application is the analysis of cells from cell cultures. Particularly, possible age-promoting or age-slowing factors may be tested, for example, in high-throughput-screening-methods, by qualitatively and quantitatively comparing the gene expression level of the genes described in this application with the respective comparison values of untreated cell cultures under the influence of the respective factors.

[0030] The genes preferably are selected from the following human genes or homologs thereof:

[0031] RDH16 (Unigene ID Hs.134958, nucleotide sequence SEQ ID NO: 1, amino acid sequence SEQ ID NO: 2),

[0032] MGC3101 (Unigene ID Hs.301394, nucleotide sequence SEQ ID NO: 3, amino acid sequence SEQ ID NO: 4),

[0033] C9orf112 (Unigene ID Hs.292570, nucleotide sequence SEQ ID NO: 5, amino acid sequence SEQ ID NO: 6),

[0034] STK40 (Unigene ID Hs.471768, nucleotide sequence SEQ ID NO: 7, amino acid sequence SEQ ID NO: 8),

[0035] TOM1L2 (Unigene ID Hs.462379, nucleotide sequence SEQ ID NO: 9, amino acid sequence SEQ ID NO: 10),

[0036] GAMT (Unigene ID Hs.81131, nucleotide sequence SEQ ID NO: 11, amino acid sequence SEQ ID NO: 12),

[0037] MFSD3 (Unigene ID Hs.7678, nucleotide sequence SEQ ID NO: 13, amino acid sequence SEQ ID NO: 14),

[0038] C19orf24 (Unigene ID Hs.591383, nucleotide sequence SEQ ID NO: 15, amino acid sequence SEQ ID NO: 16),

[0039] TRIM33 (Unigene ID Hs.26837, nucleotide sequence SEQ ID NO: 17, amino acid sequence SEQ ID NO: 18),

[0040] LRIG3 (Unigene ID Hs.253736, nucleotide sequence SEQ ID NO: 19, amino acid sequence SEQ ID NO: 20),

[0041] DOCK9 (Unigene ID Hs.596105, nucleotide sequence SEQ ID NO: 21, amino acid sequence SEQ ID NO: 22),

[0042] NLGN2 (Unigene ID Hs.26229, nucleotide sequence SEQ ID NO: 23, amino acid sequence SEQ ID NO: 24),

[0043] B3GALT3 (Unigene ID Hs.418062, nucleotide sequence SEQ ID NO: 25, amino acid sequence SEQ ID NO: 26),

[0044] FZD7 (Unigene ID Hs.173859, nucleotide sequence SEQ ID NO: 27, amino acid sequence SEQ ID NO: 28),

[0045] TUBAL3 (Unigene ID Hs.163079, nucleotide sequence SEQ ID NO: 29, amino acid sequence SEQ ID NO: 30),

[0046] MMP27 (Unigene ID Hs.534479, nucleotide sequence SEQ ID NO: 31, amino acid sequence SEQ ID NO: 32),

[0047] CORIN (Unigene ID Hs.518618, nucleotide sequence SEQ ID NO: 33, amino acid sequence SEQ ID NO: 34),

[0048] PPARD (Unigene ID Hs.696032, nucleotide sequence SEQ ID NO: 35, amino acid sequence SEQ ID NO: 36),

[0049] SIRT6 (Unigene ID Hs.423756, nucleotide sequence SEQ ID NO: 37, amino acid sequence SEQ ID NO: 38),

[0050] CPT1B (Unigene ID Hs.439777, nucleotide sequence SEQ ID NO: 39, amino acid sequence SEQ ID NO: 40) and

[0051] MATN4 (Unigene ID Hs.278489, nucleotide sequence SEQ ID NO: 41, amino acid sequence SEQ ID NO: 42).

[0052] RDH16 encoding “retinol dehydrogenase 16”.

[0053] MGC3101 encoding “dysbindin domain-containing protein 1”.

[0054] C9orf112 encoding “WD repeat-containing protein 85”.

[0055] STK40 encoding “serine/threonine-protein kinase 40”.

[0056] TOM1L2 encoding “TOM1-like protein 2”.

[0057] GAMT encoding “guanidinoacetate N-methyltransferase”.

[0058] MFSD3 encoding “major facilitator superfamily domain-containing protein 3”.

[0059] C19orf24 encoding “uncharacterized membrane protein C19orf24”.

[0060] TRIM33 encoding “E3 ubiquitin-protein ligase TRIM33”.

[0061] LRIG3 encoding “leucine-rich repeats and immunoglobulin-like domains protein 3”.

[0062] DOCK9 encoding “dedicator of cytokinesis protein 9”.

[0063] NLGN2 encoding “neuroligin-2”.

[0064] B3GALT3 encoding “UDP-GalNAc:beta-1,3-N-acetylgalactosaminyltransferase 1”.

[0065] FZD7 encoding “frizzled-7”.

[0066] TUBAL3 encoding “tubulin alpha chain-like 3”.

[0067] MMP27 encoding “matrix metalloproteinase-27”.

[0068] CORIN encoding “atrial natriuretic peptide-converting enzyme”.

[0069] PPARD encoding “peroxisome proliferator-activated receptor delta”.

[0070] SIRT6 encoding “NAD-dependent protein deacetylase sirtuin-6”.

[0071] CPT1B encoding “Carnitine O-palmitoyltransferase 1B”.

[0072] MATN4 encoding “Matrilin-4”.

[0073] These genes have age-dependent expression levels, particularly in human skin cells. In the context of the method according to the present invention the expression levels of one or more genes can be analyzed. It is a particular advantage that the expression levels can be determined in skin samples.

[0074] The herein described genes are shown in the hereto attached sequence listing. In addition to the gene itself the respective proteins are also shown there. It is apparent that the sequences of the genes may be different due to naturally occurring polymorphisms in different individuals. Nevertheless, these genes which comprise polymorphisms can be used in the context of the present invention. Therefore, in the context of this description the genes set forth herein are also understood to be such genes which exhibit slight variations in the sequences. Also such genes are encompassed by the term chosen herein, which have a sequence identity with regard to the polynucleotide shown in the sequence listing of at least 95%, preferably of at least 96%, further preferably of at least 97%, more preferably of at least 98% and particularly preferably of at least 99%. Of course, also such embodiments, wherein the sequence identity is 100% are according to the invention. The sequence identity can be determined using the computer programs known to the person skilled in the art, for example, with computer programs from the Wisconsin Sequence Analysis Package, Version 8 (of Genetics Computer Group, Madison, USA), particularly BESTFIT, FASTA and GAP, which are based on the algorithm of Smith and Waterman. The programs can be applied with the default settings recommended by the manufacturer.

[0075] According to the present invention, the following genes are suitable: SIRT6, RDH16, CPT1B, MGC3101, C9orf112, STK40, TOM1L2, GAMT, MFSD3, C19orf24, TRIM33, LRIG3, DOCK9, NLGN2, B3GALT3, FZD7, TUBAL3, MMP27, MATN4, CORIN, PPARD and combinations thereof.

[0076] According to the present invention, the following genes are preferred: RDH16, MGC3101, C9orf112, STK40, TOM1L2, GAMT, MFSD3, C19orf24, TRIM33, LRIG3, DOCK9, NLGN2, B3GALT3, FZD7, TUBAL3, MMP27, CORIN, PPARD and combinations thereof.

[0077] According to the present invention, the following genes are also preferred: SIRT6, CPT1B, RDH16, STK40, GAMT, LRIG3, DOCK9, FZD7, MATN4, MMP27, CORIN, PPARD and combinations thereof.

[0078] In preferred embodiments, the expression levels of at least 2, further preferably at least 3, further preferably at least 4, further preferably at least 5, further preferably at least 6, further preferably at least 7, further preferably at least 8, further preferably at least 9, further preferably at least 10, further preferably at least 11, further preferably at least 12, further preferably at least 13, further preferably at least 14, further preferably at least 15, w further preferably at least 16, further preferably at least 17, further preferably at least 18, further preferably at least 19, further preferably at least 20 and particularly preferred 21 of the preferably examined genes are used according to the present invention. Even more than 21 genes can be used.

[0079] According to the present invention, the following genes are particularly preferably examined: C9orf112, STK40, TOM1L2, GAMT, MFSD3, C19orf24, TRIM33, LRIG3, DOCK9, NLGN2, B3GALT3 and FZD7. These genes gender-independently have age-dependently different expression levels, which is of particular advantage according to the present invention.

[0080] Further preferably, the genes are selected from C9orf112, TOM1L2, GAMT, MFSD3, C19orf24, TRIM33, LRIG3, DOCK9, NLGN2, B3GALT3 and FZD7. These genes show a qualitatively equal change of the expression level.

[0081] Particularly preferably the genes are selected from TOM1L2, NLGN2, B3GALT3 and FZD7. These genes show a particularly high age-dependent change of the expression level.

[0082] In a particularly preferred embodiment the expression level of FZD7 and/or PPARD is determined at the protein level.

[0083] In a further particularly preferred embodiment the expression level of CORIN, SIRT6, CPT1B and/or MATN4 is determined at the protein level.

[0084] In a further particularly preferred embodiment the expression level of CORIN, FZD7, PPARD, SIRT6, CPT1B and/or MATN4 is determined at the protein level.

[0085] In a preferred embodiment of the present application the method comprises the determination of an expression level of a gene selected from the group C9orf112, TOM1L2, GAMT, MFSD3, C19orf24, wherein an expression level, which is higher than the comparison value, means a stronger expressivity of the aging condition with regard to the comparison subject or the comparison subjects. The expression levels of these genes are gender-independently higher in individuals having a stronger expressivity of the aging condition. An expression level particularly is deemed to be higher as the comparison value when the expression level is at least 5%, further preferably at least 10%, particularly preferably at least 20% higher than the comparison value. Due to the advantageous properties of this method already such slight deviations can be robustly detected.

[0086] In a preferred embodiment of the present invention, the method comprises the determination of an expression level of a gene selected from the group TRIM33, LRIG3, DOCK9, NLGN2, B3GALT3, FZD7, wherein an expression level, which is lower than the comparison value, means a stronger expressivity of the aging condition with regard to the comparison subject or the comparison subjects. The expression levels of said genes are gender-independently lower. An expression level particularly is deemed to be lower as the comparison value when the expression level is at least 5%, further preferably at least 10%, particularly preferably at least 20% lower than the comparison value. Due to the advantageous properties of this method already such slight deviations can be robustly detected.

[0087] The present invention furthermore provides a device that can be used for the reliable and fast determination of the aging condition of a subject. The device preferably comprises a carrier material and biological molecules, which are immobilized on the carrier material at precisely defined positions. Particularly preferably, the device is a microarray and/or a biochip. A biochip according to the present invention can be both a DNA-chip and a protein chip.

[0088] The carrier material preferably consists of cardboard, paper, glass or plastic.

[0089] The biological molecules preferably comprise antibodies, which specifically recognize at least one epitope on at least one of the proteins encoded by the genes according to the present invention. Particularly preferably, the biological molecules comprise DNA-molecules having a linear sequence of at least 12 nucleotides, wherein the nucleotide sequence is selected from the sequence of one of the genes according to the present invention.

[0090] As a preferred embodiment, chips contain the preferred genes. They serve as target identification by genomics and proteomics, particularly in the form of biochips, of differentially expressed genes in age in both sexes.

[0091] In biochips, among others, specially coated plastic or coated glass is used as carrier material on which the tests, which are often only a few micrometers in size, are mounted (immobilized) with the help of machines. Frequently biochips are classified according to the substances that are determined in the test: In DNA-chips DNA- and RNA-fragments are detected, in protein-chips particular proteins are recognized—often with the help of antibodies.

[0092] The DNA chip-technology uses techniques from the semiconductor industry to identify known genes on a fingernail-sized plastic or glass plate, the microarray, and to measure their activity.

[0093] Aldehyde slides are preferred. In aldehyde slides aldehyde groups are attached to the surface of the chips, which bind the amino-modified oligonucleotides via a imine formation (covalent bond).

[0094] Further preferred are epoxy-modified slides. In epoxy-modified slides amino-modified oligonucleotides bind to the epoxide group to form an amine.

[0095] Further preferred are streptavidin-modified slides. In streptavidin-modified slides biotin-modified oligonucleotides bind to the protein. The tetramer streptavidin has four binding sites, each of which can bind a biotin.

[0096] Further preferred are NHS slides. These slides are coated with NHS-ester groups. By an amino-modified oligonucleotide an amide (NHS=N-hydroxysuccinimide) is formed.

[0097] Further preferred are amino slides. In amino slides an unmodified oligonucleotide binds to an indefinite position, during the irradiation with light in the UV range (indefinite reaction).

[0098] The mode of operation of the protein-chip-technology is comparable with an ELISA (Enzyme-linked Immunosorbent Assay) in a reduced format. The proteins are immobilized on a carrier chip (glass or plastic) in exact arrangement. Particularly preferred applied proteins are antibodies. Protein-chips, in which the used proteins are antibodies, are also referred to as antibody-chips. Basically, the protein-chip-technology provides the possibility to detect any binding to a protein in an assay-format. Further preferred coupling proteins are enzymes for the detection of particular substrates or antigens for the detection of particular antibodies in a biological sample.

[0099] A protein-chip is incubated with a biological sample and the binding of a biological marker to the immobilized protein is detected in the subsequent steps. The detection method varies depending on the experimental setup, preferably applied are immune assays in a displacement format.

[0100] Similar to a DNA-chip, compared to a Southern-blot or Northern-blot, the protein chip format provides several advantages over other techniques.
[0101] Reduction of the antibody and reagent consumption
[0102] Detection of biomarkers in lowest concentrations
[0103] integration of multiple assays on one chip (for example, various biomarkers)
[0104] miniaturization and automation of the analysis system for routine diagnosis

[0105] The present invention also provides detection kits with ready-to-use reagents, all-in-one-concepts—consisting of microarrays, hybridization station, scanner (e.g. fluorescence) and analysis software. An attractively priced alternative to the usual fluorescence scanners are systems which detect the hybridization electrochemically or via a silver precipitation on gold nanoparticles.

[0106] The present invention also provides computer systems with databases, where information about the expression of one or more polynucleotides according to the present invention, having a differential expression in young or elderly test persons, is collected.

[0107] The invention will be exemplarily illustrated on the following example. The example describes a preferred embodiment of the invention. The invention, however, is in any case not limited to an embodiment as described in the example.

### EXAMPLE 1

[0108] Skin samples of four groups of adult human subjects were taken. Thereby, the groups were as follows:

[0109] Group A: Young woman (age 26.7±4 years, n=7),

[0110] Group B: old women (age 70.75±3.3 years, n=4),

[0111] Group C: young men (age 25.8±5.2 years, n=6),

[0112] Group D: old men (age 76±3.8 years, n=7).

[0113] The expression of the genes described below was determined and averaged separately for each group. For determination of the expression subsequent to cell homogenization at first RNA was isolated and then transcribed into DNA by reverse transcription. This was then used as a basis for the preparation of biotinylated cRNA, which was in turn used for hybridization to human-8 BeadChips. The relative change of the expression level was determined as a ratio of the respective gene expressions of the older and the younger group. The ratios are given respectively as logarithm of the basis two (log 2).

| | NCBI | | Log₂ | P- | Log₂ | P- |
|---|---|---|---|---|---|---|
| Name | reference | description | (D/C) | value | (B/A) | value |
| SIRT6 | NM_016539.1 | Homo sapiens sirtuin | 1.246 | 0.030 | 1.762 | 0.027 |
| | | (silent mating type | | | | |
| | | information regulation 2 | | | | |
| | | homolog) 6 (S. | | | | |
| | | cerevisiae) (SIRT6), | | | | |
| | | mRNA. | | | | |
| RDH16 | NM_003708.2 | Homo sapiens retinol | 1.016 | 0.014 | 1.186 | 0.048 |
| | | dehydrogenase 16 (all- | | | | |
| | | trans and 13-cis) | | | | |
| | | (RDH16), mRNA. | | | | |
| CPT1B | NM_152246.1 | Homo sapiens carnitine | 1.000 | 0.013 | 1.021 | 0.007 |
| | | palmitoyltransferase 1B | | | | |
| | | (muscle) (CPT1B), | | | | |
| | | nuclear gene encoding | | | | |
| | | mitochondrial protein, | | | | |
| | | transcript variant 3, | | | | |
| | | mRNA. | | | | |
| MGC3101 | NM_024043.2 | Homo sapiens | 0.796 | 0.001 | 1.446 | 0.043 |
| | | hypothetical protein | | | | |
| | | MGC3101 (MGC3101), | | | | |
| | | mRNA. | | | | |
| C9orf112 | NM_138778.1 | Homo sapiens | 0.690 | 0.000 | 0.479 | 0.050 |
| | | chromosome 9 open | | | | |
| | | reading frame 112 | | | | |
| | | (C9orf112), mRNA. | | | | |
| STK40 | NM_032017.1 | Homo sapiens | 0.621 | 0.011 | −0.419 | 0.023 |
| | | serine/threonine kinase | | | | |
| | | 40 (STK40), mRNA. | | | | |
| TOM1L2 | NM_001033551.1 | Homo sapiens target of | 0.601 | 0.001 | 0.674 | 0.033 |
| | | myb1-like 2 (chicken) | | | | |
| | | (TOM1L2), transcript | | | | |
| | | variant 1, mRNA. | | | | |
| GAMT | NM_000156.4 | Homo sapiens | 0.496 | 0.003 | 0.738 | 0.042 |
| | | guanidinoacetate N- | | | | |
| | | methyltransferase | | | | |
| | | (GAMT), transcript | | | | |
| | | variant 1, mRNA. | | | | |
| MFSD3 | NM_138431.1 | Homo sapiens major | 0.452 | 0.028 | 0.595 | 0.034 |
| | | facilitator superfamily | | | | |
| | | domain containing 3 | | | | |
| | | (MFSD3), mRNA. | | | | |
| C19orf24 | NM_017914.2 | Homo sapiens | 0.395 | 0.049 | 0.627 | 0.043 |
| | | chromosome 19 open | | | | |
| | | reading frame 24 | | | | |
| | | (C19orf24), mRNA. | | | | |
| TRIM33 | NM_033020.2 | Homo sapiens tripartite | −0.396 | 0.002 | −0.515 | 0.048 |
| | | motif-containing 33 | | | | |
| | | (TRIM33), transcript | | | | |
| | | variant b, mRNA. | | | | |
| LRIG3 | NM_153377.3 | Homo sapiens leucine- | −0.398 | 0.002 | −0.650 | 0.029 |
| | | rich repeats and | | | | |
| | | immunoglobulin-like | | | | |
| | | domains 3 (LRIG3), | | | | |
| | | mRNA. | | | | |
| DOCK9 | NM_015296.1 | Homo sapiens dedicator | −0.415 | 0.014 | −0.815 | 0.009 |
| | | of cytokinesis 9 | | | | |
| | | (DOCK9), mRNA. | | | | |
| NLGN2 | NM_020795.2 | Homo sapiens neuroligin | −0.436 | 0.025 | −0.476 | 0.049 |
| | | 2 (NLGN2), mRNA. | | | | |
| B3GALT3 | NM_003781.2 | Homo sapiens UDP- | −0.590 | 0.043 | −0.575 | 0.043 |
| | | Gal:betaGlcNAc beta | | | | |
| | | 1,3- | | | | |
| | | galactosyltransferase, | | | | |
| | | polypeptide 3 | | | | |
| | | (B3GALT3), transcript | | | | |
| | | variant 1, mRNA. | | | | |
| FZD7 | NM_003507.1 | Homo sapiens frizzled | −0.915 | 0.045 | −0.910 | 0.026 |
| | | homolog 7 (Drosophila) | | | | |
| TUBAL3 | NM_024803.1 | Homo sapiens tubulin, | −0.915 | 0.029 | 0.673 | 0.043 |
| | | alpha-like 3 (TUBAL3), | | | | |
| | | mRNA. | | | | |
| MMP27 | NM_022122.2 | matrix metalloprotease | −0.982 | 0.048 | −1.579 | 0.001 |
| | | 27 | | | | |
| MATN4 | NM_003833.2 | Homo sapiens matrilin 4 | −1.393 | 0.014 | −1.823 | 0.003 |
| | | (MATN4), transcript | | | | |
| | | variant 1, mRNA. | | | | |
| CORIN | NM_006587.2 | Homo sapiens corin, | −1.935 | 0.035 | −3.216 | 0.014 |
| | | serine peptidase | | | | |
| | | (CORIN), mRNA. | | | | |

[0114] The example shows that the described genes gender-independently exhibit an age-dependent change of the expression level. In particular, it can be seen that the majority of genes have a qualitatively same age-dependent change in the expression level. The example also shows that depending on the gene, the age-dependent change in the expression level can mean an increase or a reduction of the expression level.

### EXAMPLE 2

[0115] The expression level of FZD7 and of PPARD in a human skin sample of women (n1=3) and men (n2=3) from non-sun-exposed areas was determined on the protein level using immunohistochemistry. In case of FZD7 a significantly higher expression level was detected in cell samples of younger test persons compared to cell samples of older test persons. In case of PPARD a significantly lower expression level was detected in cell samples of younger test persons compared to cell samples of older test persons.

[0116] Example 2 exemplarily shows that the determination of the age-dependent expression level of one of the genes according to the present invention may also be performed at the protein level. This is especially true for both genes, whose expression level is increased in old age, and genes, whose expression level is reduced in old age.

### EXAMPLE 3

[0117] The expression level of SIRT6, CPT1B, MATN4 and CORIN in human skin samples of women (n1=3) and men (n2=3) from non-sun-exposed areas were determined at the protein level using immunohistochemistry. In case of SIRT6 and CPT1B a significantly lower expression level was detected in cell samples of younger test persons in both sexes compared to cell samples of older test persons. In case of MATN4 and CORIN a significantly higher expression level was detected in cell samples of younger test persons compared to cell samples of older test persons in both sexes.

[0118] Example 3 exemplarily shows that the determination of the age-dependent expression level of one of the genes according to the present invention also can be performed at the protein level. This is especially true for both, genes whose expression level is increased in old age and genes whose expression level is reduced in old age

The application's sequence listing, which the Patent Office published only in electronic form, follows.

SEQUENCE LISTING (42 sequences)

SEQ ID NO: 1 - DNA, 6204 bp, Homo sapiens
  CDS (173)..(485)
  CDS (2471)..(2729)
  CDS (4645)..(4808)
  CDS (5389)..(5603)
aaatatgttgcagaaaggcagtcatcagggaggaaagtgaggattccctgccaaaatgcctgagggcttccctgcctaccacagccctctgtgttcttaaatcctcctgtctgaacagaggccagactctggtttcccccacagcctgtctgtgtctgtcctctgcaaagccatgtggctctacctggcggttttcgtgggcctgtactaccttctgcactggtaccgggagaggcaggtgctgagccacctgagagataagtatgtgttcatcacgggctgtgactctggcttcgggaaactgctggccagacagctggatgcacgaggcttgcgggtgctggctgcatgtctgacggagaaaggagccgagcagctgaggggccagacttcagacaggctggagacggtgaccctggatgttaccaagacagagagcgttgctgcagccgcccagtgggtgaaggagtgcgtgagagacaaaggtaaccacccaggtttgtcaagtctgtctgtgtcttccctctgtgtgaagggaccacctcctgtctgctccctgggaagattcctacagtgtctttccaggttgaagtaacagtagctttctaatatttctcacttaacaggctgcctgaaccccatctcttttcaatccttaacctctcccgacattggaggtgtctagtcttggggagagtttgccctgatgagattttctctccagaattcctctctatcctctccctcctgtctaagcagaagtcatgtgttgtttgatgctaagagcctgggttagagatctggagacttgctggagcatcgttgagaagggagcacagggctgcaagtgtgcacggaggctgtgcctgtgctggagccaggcttatgttcccagcactttaccttgtttttgctagggcccatcagcgtccactgagagctacgatcatctccatcttcagaggagagtatcagcttaaggactgcttaaggaaggcagaactagtaaggggttactttttctttctttcttcttttcactacactaattcatctgtcttattatagaggaagaaagaaacatggatttattttatgtaacaataaatcagaatatgatctttgtggaaaacactgaaaagaataaagatgaaaacaagtttccctgaaattgtcatccacacataagtcctttttacaattatacaaaattaggattttatattttgttcttagtttcagtcaccttaaattctctggagaagatgaacacttttccaccataatgactgtttttataaaattatatttaattatttagaatactgtatccttccaatagccttacctatgtaatccatactgagtggttggatatgaaattccttcctgctttttattcatcataaatgtcatcttggtggacttttatttgccaacgtctctgtaagtgtgagtattgattggattcttaaaaatgagatgtctgggtggaggaatctgcatttgcatcagggcagggcctgttattgagcaggggacaggttcatatgcctgggccaacccttccagatcaacaactgccaccccctgcctggactcaagggaccctgtgctcctgccccctagctctgtgggttgaaaactctattgacttgaagtcctggggattgtgtatttgcatcttccagagagattttcccagagctgggtgaacttgggactaaagggaaggatgaagagtgggcttctgatgcagtaggaggagagggtgacattttctggggcagagggtggagtctgtgtactgagtggggtgacgcaaccttgctttcttcccaaagcctgtgcattggaattcccctgtgctttctataaaaatgttactgatgcaggatgtttcaagaccagtgccctgagttcaaacacttgggaaacaggatgtttcccaagttcccccaagcctaggatttcaggtctgtctctttctctctttcctgtctccctcactctccctctttcttgtctcttattccatcaacagatagttgctggacaatcactatataaggtgttagcacacctgaaaatgcagctgtatgtctgtaatgtctgcaacattcatgtttaactaaccaaacattggtcttcatgtttccagactaatgcatggacaatagttctttaacatgatttcatgcagtccttaaataggggtaatagcttattgtctttcaggcagtaggctggtccatgaagagtaaatggagaaagacctgggttttgtggcccaccagctgctgaatgctcagcccccacccctgtgatactgtggtgtttgttataccctcctccccatcccacacctgtcagtctgccctcactttattgggatgtgatttgcaccctaactctgtccacctgcacaggcacaacacagtgatgctctctcatcttcccactgtcccaggactctggggcctggtgaataatgctggcatctccttgcccacggctcccaatgagttgctcaccaagcaggacttcgtgaccatactggacgtgaacttgttgggggtgattgatgtgactctgagcctgctgcccttagtgaggagggccaggggccgtgtggtcaacgtctccagtgtcatgggccgggtgtcactttttggtggaggctactgcatctccaagtatggcgtggaagccttctctgactccctcaggtatgggtctgggatggggcccaccctagtcttcctgctcctgtccttgtggggaagtcttttccagggagttccttgaatcccagcctgtaagttcctttcatgagatcactctctgtcttcatgtgtgacaccctcatcttcctctttctggattgggctggccattcactgggaagcaccttcctgagtgctgggcgacaggaggggccccaggtcagagagtttcttgaacgatacctcttccctggatggatctcttggtcagaaactgccagaggcagaattggacctggatctttggcttcagatcctaccaagaggaacacagtactgaggttaccaagcccaggacaggggaacactgtgtatcaatgactaatcccagggaaggaccctaaacacttcttcccattgcaccttggtattggagccacaaaggcagaccaggcagtcagtgctggatggaagaatgctttgcaccctagagaaggagcagagaaagatcagctacagcagtgtgtgttggtcccctagccagggaggctctcccagcagctgacactgggcatgtggcttgctaacacccctctcttgctgtagtagaaggaccccaacccctcctcccaggaatctgaaatacttgtaaacctggggcatgccttagggccgcggacacacacaagctcatgcagacgcaagagcactcactgagtcagaaacagggaaagatatttccacaccaggagatgggtgcctggctctggggctcttcctctctagggagagaaatgcttcaagccctgaggccattccttcatggctctctggggcccaaagacagcatgcaggagatggtctttcccagcagaattcatatccagagcccctttgacgatgggtagagcatctgagtccacacaacagacactttaggcccttgtccaagtggccaaaaatccatccttaacaacaaggttttgtctgtgacttaaaacttgatacctgggagagggacaagagatatagaatcaagtgccaatgcttataaggttggtgaccaagtcaaccttgctggccatggtacccacctgagttgaggagagtcctggagattccatctgagctggggattgaaaactcaagctggggattgagaactccacctggcagcctggtaaggaagactgggaaaggctcctagatgaaggaatgccatcagcccaggcccagagtgagcattagccacctgcatgtactgcagaatcctcttgtggtgaaggtcaaggccaagcctggtgggggatgctgggcaggtggtcataggtgggctccttgagggcctgtgggccctggacaggagttgtggcttatgctgttggcagtggaaccccctccagaaaagggatttgctcaggggagctccttggtccagtcagcttctagactcccactgactgcaggaagcccagtggttgtaagtgtggggagccagactgaagacagatgcttcttagaggacagctgccatcacccagctcagaggccagggagattcctggggcaggaaaacgagggaggggactgaggactggagaggaggcaaaatgtgggaattctggtgatccactggatgtgagggacataggaggagacagcactaaggtgctgccttgctttggaattggtaggatttagggctagtaagctcaggtgtgtaaaatatggaaactccatacagagggaatgccaccatgataattatgaccccttgattgctggaaattaaatattccaagctttctattttacccattgtcctcatatgttgtgatatcatagttttacttttattgtttgtgttttaccttccaagacccccgaagtttttcccctctgcttctctgtcttgcaggagggaactctcctactttggggtgaaggtggctatgattgaacctggctatttcaagactgctgtgaccagtaaggagagattcttaaagagcttcctggagatttgggaccggtccagtccagaggtcaaggaggcctatggcgagaagtttgttgcagactgtgagtaagctgtggacagtggggagagaagcaaaccctcgtgtggaatccttggtctaccattggtgtctgaagggcattagagtttgatccccaggctctcccttccccacagagtggagacctttagccccatttccatgatgggtgctgtgtggtcaactggtcatgaaaagcaagtgtccaggcttctcagaacttgggaccagtgtctatctgaacccatcgttactgaggaacaaagggaagccagaaagggaagacattggtggctgatcacaagctggcattagagacagcttgtttttatgtgctgagacttctactgtgggtggagaccatcatttatgcagtccagatattcccaaagagagacagacatgacttagtgtgagacacttgctactttcacatggatgggctccagctcagggaatttggataaaagagatttgaggcattgcttgactgggggttgtggggtggcatgagttcttagaccctttccactctaagttgaatccaaagcaggagcggttagaggtggaaatatacatggattgtttctgattcttaacagataagaaatcagctgaacaaatggagcagaagtgcacacaggatctgtcgttggtgaccaactgcatggagcatgcgctgattgcctgccacccccgtactcgctactcagctggctgggatgccaagcttctctacctccccatgagctacatgcccaccttcctggtggatgccattatgtactgggtctctccaagcccggccaaggctctatgaagctaaggttggatgcatggttgcatggatttggggtgtgctatgaggggtggtgtatccttgggagagatataaagtggagggagggagccgtccggtcagtagggcaccaatcccacctccttcattacctcctggccatgattctcctgggagataattctgctctctggagatgttggtaggaaagtttcaagttacgcagctgagaaacagggaccaaatagtgctcctgggtgcattgtcaccgtgggtggccactcaagggtccaagcctctagggccatccttgggctaacaactggggtgggtgtgagcaggtggaaggagcctcagcccatgccattacctcctgcttccttatcaggctgtgtgttaattctgggccagtctacaccctcccacggggtggaaatggcctggaggatgtgagggcacccctcctctgaagatccctgtacacgtggtgttgggactggaaccattatgcggccccataggcctcaggagtcatcccagaagcagtggctgggaggtggtgtcctaagtaaggatctgtgcagaggacaaataaatcagtttttgatttgtcttgaaa

SEQ ID NO: 2 - protein, 317 aa, Homo sapiens
MWLYLAVFVGLYYLLHWYRERQVLSHLRDKYVFITGCDSGFGKLLARQLDARGLRVLAACLTEKGAEQLRGQTSDRLETVTLDVTKTESVAAAAQWVKECVRDKGLWGLVNNAGISLPTAPNELLTKQDFVTILDVNLLGVIDVTLSLLPLVRRARGRVVNVSSVMGRVSLFGGGYCISKYGVEAFSDSLRRELSYFGVKVAMIEPGYFKTAVTSKERFLKSFLEIWDRSSPEVKEAYGEKFVADYKKSAEQMEQKCTQDLSLVTNCMEHALIACHPRTRYSAGWDAKLLYLPMSYMPTFLVDAIMYWVSPSPAKAL

SEQ ID NO: 3 - DNA, 14659 bp, Homo sapiens
  CDS (9483)..(9573)
  CDS (10100)..(10246)
  CDS (10606)..(10746)
  CDS (13038)..(13192)
gccggggcccgggagcagctgcgcgccccgccccgccccgcgggctcctccctgccgccgcggccccccggttgctgccccgatgcgctgcgcccggagccggggccgagtcgctgccgcagctgttggggcgcccgggccaggcgacgccgccgtcgcccgtgcccctcccagaccgcaccggccgcatggagcccccggagggcgccggcaccggaggtgagttcagccccagcccccgagacccccgcgcagcgcttccccgcagcgagccgcagcccctccccccagggctcacccttcgccgctcccgggagtcgcgaagacccctttggcagctcggggtcgtccggcgggccaggggcacctcccgggcgcggtccccgcgcggggctgggggcacacggaccgagtctccgcccccttgttctctgcgctcccggcccgggaagccgtgcccggcacgctccttggtgggtggcccggagtttcgtcctgagccccctcccagccaagccagccggtgacccggggagcgggggaggggggttccggggctggagtttggggtccctgtcggtggggcgtgagggcgacgctggccgcttgcaagcgcgtccgctttgttcgcccagccgcgagtcccggggggcgagggccgtagactcgcgggcagggatcctgccaggggcgaggggctgagatgggtcttggggatgtggggcatgcacgggcgcggcctgccggggactccagagctgcaagggtggctggtccgggagtggcccaggcgcacgctcatcggggagggtaggtgcgcgtggagcgctccctgccctgatggtggaggccctactgcaggaccttggagtcggtaacgggaagaaagctctcagaacctccccccttcccgatcagagacttttccaaaagggctttcggggttccatttgcctaggtaggaacttggatgcaaactgcagactcctccacctgcccagccaagcccaccacctcctggtttcctagagctcccattccagggagccagcaggtgcctgagggcacaggcaggccagcctgccgctctggaactacatgggaacctctcagtcccccagccgcacacagtggcatcctctggagcccgaagggctgtccccgggaggagcaggtccacccaccctgtgtatctgcagtccaaggtatagggacaaatgccccagggctggtgggtttgggttttgatttgtcatttgtgggagggaccagagctctttcttaacactgatagtcccaggctcctgggtattcccagtagcagctttgtggacataggaagcctggaggttgggagtgagggcttgggggtctccgagctgtttccagctgtgaactgtgggcagtcaggcccctgtgagcctcaatttccatttctgtcagtggagacagttctgcttcccctgcagggctgtgggagcccaaggcatttgggagtggaggttaatatgttttccctcctcctttgggaaaaaaggaggacttcccagcagcttaaaaggcagagaaagcaggttcagtttctgagcccatcagtcactggctgggggcttcagacacctgactcaatcagtgcacaggtatttacctacaggtcgcagctctgtgcagtaccctgcctggggtggggagttagtgggaagacagggccctgtcctctgagggctcacgctcttgacaccaactcctgtttccttgtctgcaaagtggccagtgatgcctactttgtggaacctcatgagatcacacattggtgactctgtcattacttatcacttacttttgaaaaccttacaaaagtagagagaacggcgggacaaaggcccatgtgtgacatcccagcccccaggcccacagcctcctctccagactaccaccaacctcccttcattagtggtttgaaccaaatctagacatattatttcactgataaataattcagaaatatctgtaaaatatgattttttttttttttgagacggagtctcgctctgttgcccaggccggagtgcagtggcgcgatctcggctcactgcaacctccacctcccgggttcacgccattctcctgcctcagcctccccagtggctgggactacaggcgcccgccaccacacctggctgattttttgtacttttagtagagacggggtttcactgtgttagccaggatgatctcgatctcctgacctcatgacccacccgcctcggcctcccaaagtgctgggattacaggcgtcagccaccatgcccggcaaaataggatttttataaagcattattaaaacactatttttgcaactaaaggaattaatgatttcttaatatgaaatgtacagaacacggaggtgcacgtgtgcacaggaatgtgacctgtgccctctctgagggccccacctggaagccagggctgtaacccaccccaactcagtctgcccaagggtccacagggacagagggatcctcaggaggctgagagtctagacacggccactccagcatccctgaaatactttgggggtccaaatccagagaggaaggtgctgggggatggggggcaggtggcccctgcctctgcgaccatctctccttccagccatttagttttatgatattcattcattcacttcattagctcatccgtccatacagtggtgtgtgccaagtgcctcctcgatgctctggacggggccctgggcacacaacagggaacaggatttgggccaagtttcccagtcgagaatgtgctggaaaataggtcagcagcagagcacagggcatcagcaatcagccctcagggaagcctggggggccgggctgaggcaccccaactcctggctccctcgctgaggtgctccttcagtgcccactcatcagcgagggcaccagcagcccctgcaggggggttgggtcccccttgataggggctgtgctggggtaaggaccagaacattgctgtgtccccacactctggggtccttcctgggacatcagaaacacctgcttgcctctgccctggccctggagaccttgggggctgccagcacccgcccccatgcctgcctggcattgagcctctggttcccaccctgggaaaagcagcaggtctcgcccgtgaggaattttcttcttcctacaagcttgttgagagggtgtcagacaggcctgggtgattcctagcgcagtccctcactaaccgtgggctagttgattcaccctcatttgtttactgcgcacctactgtgcgctaggtcccaggaatgcagccatgaactagatacaagccgcttagagctgatgcttctcgctctacccagtcccagcctgctctggggctgtgcctgggggtctggcgtgtggccgactcacagtgtatgtgagtctctgtcatttcctcccggctttgcctatcagttccagccaagatcaacctttgtttccattgaggattgtttttaaattgagatattattcacatataaagttcacccttttaaagtgtacaactcactgtttcagtatattcacaaaattgtgcagtcaccaccactatctaattttataatatcttcattacccccccagaaagaaacccatacccgttctccccttctccactgcccaccccccagcctctgacgatcactgatggaatgtctacgcgcttgcctattctggacatttcctaggaacggcgtcacacagcatttgtccttttgggcctggcttccttcactcgaatgaggtgatcaggctcatgcatgtgatatccggtgtcagtaccgccgtccttcttgggttgaatctcactccatggtaggcacagaccacattctgtttatccattgatccactgaggacattggattatttccacttttggctactgtgaatcacgctatgaacatgcatgtgcagctgactcttgaacaacgttaagtgttaggggtgcccacctccctcaaagtcagaaatccacatagaacttttcactccccaaaaacttaactgctaatagcctactgttgaccagaactttactgatatggtcaacgaacacatatctgtatgctgcatgtattacacagtaggctcagtcatttgaggacccacgagcatgccttatagcagctgcacgctcttcatgccaagatccatcgtgcccctcctgggggctcaggtcttgtccctggtatcacattcttctggccaaaaaattcgtgtcctgatggcagaagctgcatcttccaaattttccttccccaaagccccaacacagaccacggcaccagactttacagaataaagaccaggccaaagggagatggggaaggaccagactagacacctggtggcttcaaatgcttacaggactggatctcatcaacgctgacaccatcagctacagatgtgttgctgtctcaagaatgtggaaataagaaaagatgcttttttttttttttttgaaacaagagtctcgttctgtcgcccaggctggagtgcagtggcatgatctctgctcactgcaaactccacctcctaggttcaagcgagtctcctgcctcagcctcctgagtagctgggactacaggcacgtaccaccacaccggctaatttttgtatttttagtagagacggggtttcgccatgttggcccagactggtctcgaactcctggcctcaagtgatccgcccgccttggcctcccaaagtgctgggattacaggcgtgagccaccgcgcccggccgaaaggatacttcttaagagtcaactatgatattcattccacacagggctgctgtgaagcttccacagggctagagctttgtcccagaagctgtctgtagccccttgggaccccaggatctataatgaggactgctggcattcgcatgccccctctccagtgcaagatggggaaggggattgctgtttggctgaggtcctgcttgggacctccatctcagcacaagcagagggtgcctgcagacttacctccctctggactgtgcccttgctggcctcgtcgtaaaaatgcaggtattggcccggcacggtggctcacacctataatcccagcactttgggaggccaaggcgggcggatcatgaggtcaggagttcaagaccagcctggccaacagggagaaaccccatctctactaaagatacaaaaattagccaggcatggtggcgcacgcctgtaatcccagctacttgggaggctgaggcaagaggatcccttgaacccaggaggtggagtttgcagtgagcagagatcgcgccattgccctccagcctggtgacagagcgagactccatctcaaaaaaaaaataataataataataatttaaaaattcaggtagatgctgtcccactccattcaaaacccttcaacggcttctctcagcttactcagtatagaaaccaaagtcctgacgatctccacacgacctgcacacaccacccctgccctgcctcacagcccccagctgtcctcaaatgcactctgctcaggcctttatgcatgtccccccccgccccacccagtatcacacggctccctcccacctccaggctcctcctccaagtttggtagagcaccctccccagatgccccctaaaatgggagcacagccccgcactgctcactggcactggccgtccctcagaagggcaggaatcatctattttgtctatgccatgtccccagaacagagggtgattcggaagtcttggttgggtgaatgaatgaatcagagccttcgtctagatgaggggccccgcccagtgagagggggactacaaggggagacgccacctctgtcccaccttccttcagagatccacgtccccccaggtcaggacccagggaacctaagccagcaagtggggacttcctgctccctctgctgggccctgaaccgggatccctggttcccatctccacgccatgatcaggaacaggctgacaggtgatggctgagagctccagctgcgtccctggccagccctgtgctgcatgctggggacagacgctgagctgctctgtgcctcagcttcctcctctcaagtacaaagctcagagtcttccccatgtagctgggagttagggtgaggtgagaatggagttagtcaataaacacagaatgctgggactgtactagaaaaccataagccactgtctttttttttttttttttttttaaggcaaggtttcgctctgttgctcaagctggatggcacgatcacagctcactgcattcttgacttcctgggtttcaggcggacctcctgcctcagcttcccgagtagctgccacacaggtgtgcaccaccacacctagctgtcattattaacacagaaccacctgccccacctgcctctgagggtgctgtccccagagattctctgcagaactactctggccccaggtttccttgatattagggggctgccagagaggagggggtgggaggccagggtgtatgatcgcttgaacccaggagttcgagaccagcctgggcaacatggcaagaccctgtctctaccaaaaaaattttaattagccaggagtggtggtcccagctactcaggaggctgaagtgggaggatcgcttgagcccaagaggttgaggctgcagtgagctatggttttaccactgcactccagcctgggcaacagtgagaccttgtctcttgagagagagaggccaggtgcggtggctcatgcctgtaatgccagcactttgggaggccgaggcagacggatcacctgaggtcaggagtttgagaccagcctgaccaacatggagaaaccccatctctactaaaaatacagaattagctgggcatggtggctcatgcctgtaatcccagctactcggaaggctgacgcaggagaatcgcttgaacccaggaggcggaggttttgatgagccaagatcacgccattgcactccagcctgggcaacaagaacgaaactccatctcaaaaaaaaaaaagagagaggagaggagggggtgcccctcaggacagaaggaggggcggggagggacagaggtggagctgacagctacaccccagagtgctgctctggggtaagggtgtccatggagttcatgcctggcctgtaaacctggggaggtaagagcccctgtagccttcctcagctggggatcctgagagcagggcctcctggccggtgacgtacatccctgcaccttggttccccactcgtacctgctctcagggctctgggtcagccatgccagagggacagcgcctgctctgtcctggacctggcaggtctgaggcccctgccgcaccctcagggccggctgcagcaccctcctgagactcgaggctaggacagggctacgccctctgcagccacggccactgctctgagctgtgtggaagcattttggaattgtgaccacagcacagtccagcaggacatgaacacactgtgggcgggggcctggggctttggtctacactgtctctccttgaggaagggcccaagggccaggctgggtctcctggagtcccctctcctgggcaccccctcagcgctatggacaatggtcaagcaggcttcttcctgctggtgtccgggaggtccccctgctcacagccttagaacagagtccacatctcaccccctgtcccctgtgccctctgggcggagaggtatccctgctgggcttgggggtgggccaggacaccagtaacttgaccctttaggatgctcagaaacctcattccagatgccagtggaaaggtggaaaccagattccgcgagagccccgtccagcccgcccaacccccaggcctgaaacgggccatgccatgacacagcactcggcttctcagacaggaggcaggtgggccacacagaatgaccacacggccgacggggcgaggggacactgtcaggccacagggctgcccccaggcacagcctaacactcggctcgctgccaggccacctgcccacaaccacactgcccagctcttaagccactggggacctcccagccctgcaccggtgcccctcactcaggaggccgggcacctgcgggcctcagctcccttggctctgctggggaggggtgggggtgcaccgggacggacgctccaggcccacctggcagtatctaggctgccagctagtgccacgggggaggacaggcccacccctcacaggcagctgctggcgctgtgaaccccagctgcagccccctcagcaagagcctcatggcagcagctgctcccctcggcttcaagcacacccagctacgatcagtgctcaccgctgggggctgccaaaaataccccacagggtcctcagggtgctgctggcagcaacgggaaggcacctatccatctgacaagcgtgcgctgggcacccactcaggtgggaggtgctggtgtccccagaaggcccctgccatgcagggtccaggaagcagctgagggaaggagggccatctggaaacaggttcctgcaggggcaatgggtggggggaaggaagccagcgctttgtctcttccctgagagatagacccacagggcctagggccaaaggggggcatgcacccagggacaggcctgactctgactaacaggactcactggctgcctgaggcaagtgaggtggccgctaggacggcgtggccctggatgagagggtgagcagctgaggaggggctgaggggatctgtggagggatggacataagactcgccaatgtccccggctttgggtcagcagccaaggggcctcctgctctcatctgacaaaacaattgttaagtatataaaagaaacagttgggccaggcacggtggctcatgcctataatctcagcactttgggaggccaaggcgggtggatcacgagtaaaaatacaaaaaaaaaaaaaaaaaattagctgggtgtggtggcgggcacctgtagtcccagctactaaggaggctgaggcaggagaatcgcttgaacccgtgaggtggagactgcaatgagccgagatcgcgccactgcactccagcctggtgacagagcgagactctgtctcaaaaaaaaaaaaaaaaaaaggtagttacgtttgtgaaaaaaaatgaggccaggctcggtggctcacaccttgtaatcctagcactttgggaggctgaggcgggcggatcacctgaggtcaggagttcagcctggccaacatggtgaaaccccgtctctactaaaaatacaaaaattagccgggcgtgctggtgcatgcctgtaatcccatctactcagggggatgaggcaggagaatcgctcaaacccaaggggcagaggttgcagtgagccgagattgcaccactgcactccagcctgggtgacagagcgagactccatctaaaaaaaataaataaacatgggagaaacctggaagaatatttgctcaactgtgaggcatggttggtggctaagggatcacagaatggcaggcctgcctattcctcctggtttgtaactttcatttaatgagaatgtattattctgaactcaaatacgacatcagtttttaaaaggaaaagtcagtccacagtggagaggggctgttctggtttgaaggggaccaagaggctggacatggaaatccatgggcgatccttcaggggaccctgggccgagctagaaatcagaggccaggacggcactggaatgcagccacgcgggccctggtgggacttccacgcctgcatggtcggctttcatgggtgcttgcgtaccaaaggtgatctggatctcagattccttgttcactaggggaggccagggcccaaggggaaggagcagcctccttgaagcccctcaaccccttgtctgggtccaggcatgaggccacaagcccagccatcccatcacctgctggtcactgcccagagtttcaaaggactggatgtgccaagtcctcacacccagccccgcgtcctggggggatgtgggagccctgtggatctcaaggtgacactgtgtctttggatgcagagatcgttaaggaggctgaggtgccgcaggctgcgctgggcgtcccagcccaggggacaggggacaatggccacacgcctgtggaggaggaggtcgggggcatcccagtaccagcaccggggctcctgcaggtcacggagaggaggcgtaagtactgctccctgcccagcgcacgctatggggaccccgtgagctcccccaagagacaaggcagcagggtccacctcctgtccaaacactccctggggggtctaggtccggcgctgtgtgctaggctcttgcagctctggttctctgagcctcagctgcaccatctgtcaagtgaaagccttctagtcatgagtatacgcaacactcatcagatcctgccggtgtgggctttgcaggaagctgtggttcacccacagccttgtgggaggacacagcacactctctcctagacccccggggctctgagcagccttgtgggagggcctgagggctgactgtaccccctctgccctcagagcctctgagcagcgtctcctctctggaggtccacttcgacctcctggacctcactgagctcaccgacatgtcggaccaggagctggccgaggtctttgctgactcggacgacgagaacctcaacaccgagtccccagcaggtgaggccggcatcagggctgggctgggaggtgtgcctggtgggctgaggccccttgggaagtcctgggaggtgtgtgtggtgggctgagggcccttgggacgtcctgggaggtgtgtttggggggtgaggccccttgggacgtcctgggaggtgtgggtggtgggctgaggccccttgggaagtcctgagaggtgtgcgtggtgggctgaggccccttgggaagtcctgggaggtgtgtttggggggtgaggccccttgggacgtcctgggaggtgtgggtggtgggctgaggccccttgggaagtcctgggaggtgtgtttggggggtgaggccccttgggacatcctgggaggtgtgggtggtgggctgaggccccttgggacgtcctgggaggtgtgggtggtgggctgaggccccttgggaagtcctgggaggtgtgcgtggtgggctgaggccccttgggaagtcctgggaggtgtgtttggggggtgaggccccttgggacgtcctgggaggtgtgggtggtgggctgaggccccttgggaagtcctgggaggtgtgtttggggggtgaggccccttgggacatcctgggaggtgtgggtggtgggctgaggccccttgggacgtcctgggaggtgtgcgtggtgggctgaggccccttgggacgtcctgggaggtgtgtgtggtgggctgaggccccttgggacgtcctgggaggtgtgtgtggtgggctgaggccccttgggacgtcctgggaggtgtgtttggggggtgaggccccttgggacgtcctgggaggtgtgtttggggggtgaggccccttgggaagtcctgggaggtgtgtttggggggtgaggccccttgggacgtcctgggaggtgtgggtggtgggctgaggccccttgggaagtcctgggaggtgtgcgtgtgttttagcaagaatccctcagcacttcatttcaccacgctgctatctgcccaacttgaagcaacttccccgtcacagctgcttaaaactttacttttcaagtgagcaacagacggctaaagccactgtcccctcaaaagcagaatttaatgaatgtgaattttcatcataaaatgggccaagaacgaaaggtgggggtggtcaccagcccgggcccctcctcagctcacttaacttcctctgattcccacgggagcgttgccattggcctgaaggcagctccagtgtcctcacactgccgagcagggcccccagcacggccattgtcgtgtctccttcctaagccgtgacgagagcacaggactcatgaggatgcgacagcgcgtcctcagtctctgacagtgaccagtgaaggacactgacgtgacctgtgtgaacttcagtaactgtgagagcatcagggccgagccttctccgcatgggacagtttggcccagcctctgcttcccaaccccccaggccactcaggacctcattaaaaggaccagccccactgtgactcctgccggtggccagctgctcccatggttcctggagttgtcaggaaggggtgtcggcctgtgtgtcccaggctgctgcagccccaggtgtctgggagggaatggggcctcatgagtcagcccccagctcacctccaggacaaggccattgcctgaccctggccagttcccaccagctccatgttggcggcaacccttcccacccagcccgtgagcccaggcatggctgttgtggctggggaggtggagtgaggggctcagactccagcccacccgaatccccagccccacagagcctgcaccggggactcacaaggcccatgatggggcagaggctccaagaggccggggacacacaaggcccatgatggggcagaggctccaagaggccggggacacacaaggcccatgatggggcagaggctccaagaggcctgcagggctcatggagggtggttggctgaggtgggacacctgcggggggaacagtttagggaggccccaccagggtcacttaatgaccaaacaggagaggctcagcctagactatacagtgactccggggagcaccagaaaagaccctgcccaggccccacccagaccacaacatccacctctctggtggggccagtgtgtggtgggggcctcccgttagaggtagatgtgtgcatgcctggtgcagggggctggtgcagagcattggcaggagtggcgcaggaggccggcggcacctggagctccgcagcatccacccaggcctctcagccacaccgagttccccttcccgcatgcccctaggtctgcacccgctgccccgggccggctacctgcgctccccttcctggacgaggacaagggctgagcagagccacgagaagcagcccctaggcgaccccgagcggcaggccacagtcctggacacgtttctcactgtggagaggccccaggaggactagaccatctccacctgccccagctcctgcagggatggggtccgaacacgatggcagatctgggcagtgctgacccagcagacacacttcacccgcccacgaggctccagccgtcacctcctgacacacaccctgggggcagctctctgccagccccgagaccggccttgtctgctgggcacgggtcttcgcctcacttggagaccagccggctttcctgggggacacacggggcccccggatgcctctgggagccccagcacaagcacagcccagtggccttacgtccagctcgttcctgggccccgagtcaggaagacagcgtcacggagtcactgccaggaacgtgctgaggaatggagtggcccacggcggccttggggtgaaggggacccaggcctgtgacagccactccaggaactcctgggggtgctccaacctccgcgttttcctgtgctgccaagctcagaagccagaggcgggtttggtagtggctaatgggacaatgtgctgtccagcaaagcacacatggagaagcggccccaaaattcccaccttgatttccatcctgccccttcttctactccacggaggcgctgtctcactagggtcccctccccaaggctcagctctaagacctgcacctgcttctcttggcccctgcgtgacagacaagtccattccctccttagctcagaacaccaaatatcaccagactgcctaagagacttgatgacacctcccggaatgctctcggggtggggttcacctctccttgtcctgcacccactgctaggccacattctcgtttctgctcacatcccattgcccggctacaaggcctgcccacggcccttaaacttgctgggcaggtttggagcccatgggaccccgtgggtctctgtccaggagcagcagaggaggctgacaggccctgctccctctgctctgggggtgtctgggagccccagctcacaccctcccaatgcttatatgctgaagctcacagaatgggcttcttgcctgacagcaagtcaaagaatgagtttaatatcaaagtgtaagcttactttccatccccaagccagcctgccccctgccccatttcccatgagcacacttctggggaaggaaaacaggctcctggccttcactctcagcagagctttggagatgccccaggcatgccctgagctccttctgtgtacctgctcccacttctgagccacccgctgcccctccgcactgctggcaaacccagttcctgcctcagccaggtctccttccctggtttccagtcacacagagcccagcagctttctctttcagtcccataagggcagccttgtgtccctggccacacttccacccgccagggtcttcctccccatctttccatccttcctgctgagcttccacagagctcgtttgcaaacagggggattaaagcatcactgcgcattcgaa

SEQ ID NO: 4 - protein, 178 aa, Homo sapiens
MGETWKNICSTVRHGWWLRDHRMAGLPIPPEIVKEAEVPQAALGVPAQGTGDNGHTPVEEEVGGIPVPAPGLLQVTERRQPLSSVSSLEVHFDLLDLTELTDMSDQELAEVFADSDDENLNTESPAGLHPLPRAGYLRSPSWTRTRAEQSHEKQPLGDPERQATVLDTFLTVERPQED

SEQ ID NO: 5 - DNA, 24027 bp, Homo sapiens
  CDS (159)..(311)
  CDS (1333)..(1466)
  CDS (2769)..(2856)
  CDS (4093)..(4184)
  CDS (4556)..(4728)
  CDS (13782)..(13851)
  CDS (13978)..(14043)
  CDS (14330)..(14502)
  CDS (23288)..(23694)
ccccggaaggagtcgcgagagaggcggcccgcgctgacggtgtccctggggctctgcgctcgtccggccggccccggcctcgccgccccgcgcagtacccagcccggccccgccgacccgcctctactgccggctccgcgcccttccccgagggctggatgatgggctgtttcgccctgcaaacggtggacaccgagctgaccgcggactcggtggagtggtgcccgctgcaaggctgcaggcacctgctggcgtgcgggacctaccagctgcggcggccggaggaccggcctgccggcccccagaacaaggtgcgcgcgccgcggcttcgggaggggagggcggggccggccacgaggttgaggccgaaaggcgcaccgaatcgcccaggagatgaagaggggatattggccctttggccaggaggtaggctggaaacagtttagaatctttttaaaaaaattgttctcggccgggcgcagtggctcacgcctgtaatcccagcactttgggaggccgaggcggacggatcacgaggtcaggagatcgagaccatcctggctaacatggtgaaaccccgtctctactaaaaaaatacaaaacaattagccgggcgtggtggcggcgcctgtagtcccagccactcgggaggctgaggcaggagaatggcgtgaacccgggaggcagagcttgcagtgagccgagatcgcaccactgcattccagcctgggcgatacagcaagactacatctcaaaaaaaagaaattacttttttctgagacaaggtcttgcactgtcacccaggctggagtgcagcctcggactccagggctcagggcatcctcccgcctcaaccccctgagtagctggcaccacaggcacgagccaccgcccccggccaactttaaaatcttgagagcagaacgtcttctatatacaggtgtggcccaagggaatgggtggaatgtacagtaaagagaaagtgggaattatatcttaacttctggtgggtacatattaggatccaaattgggcactggaacaacaggcgtaagtcaggactgtcccaggcaaactgggttctgtggttaccctagccatagctggtccctgttggccggtttagaaggagccttctctactgggtccaggagtgttcacctactcattaatagacgtttctccagctcagaaaaccagaggttctccttccaggcagaattccactcctttagtcatggcaaacctttgagttccttggatcccttttcccatcctttgggttccttcgtgtcttgggataatcagagactacctctgcattttttgtagggtggaatggaagttaaggagcctcaggtccgtttaggccgtctcttcctgtacagtttcaatgacaacaactctattcaccctctggtcgaggtccaaagaaaagatacttctgcaatcctggacatgaaatggtataactgtgataatcccactgggtgtagaatttgtcatgagtagcaatcagggaagcctgatgcctgatgccttcaacaagacaggcattgcatctcaactttggatttgtttctttgctgtcccgcctatcttccacctggggagtgctttacctggggcttatttcctttgtcatgttccagccggggaagtgatgggagttttctgacttcataacctggggcgtcttttgtttgagaacacagttgtaggctctagcccacttttggagctgagatttaaatgcagtggtgtgtggcataattatgttttggtcaacaatggagcacgtataccatggtggtgccttaacgtaatggagatgccctatacaggtgtaccagtttttatcctttttaatttttttttttttgaggcagggttttgttccgttgcccaggctggaatgcagtcacgtgatcatagctcactgcagccttgaactcctgggctcaagcaattctctgtctcagcctctcgagtagctgagacttcagacttcaggtagatgccaccatgcctcttttttttttttttgagacggagtctcgctctgtcgcccgggctagagtgcagtggcgcggtctcggctcactgcaagctccgcctcctgagttcacgccattctcctgcgtcagcctccctaagagctcggtctacaggcgcccgccaccacacccggcttatttttttgtatttttagtagagacgtggtttcaccatgttattaggatggtcttgatctcctgacctcgtgatccacccgcctcagcctcccaacgtgctgggattacaggcgtgagccacgacgcctggccttaccacacctcatttttgtttgtttgttagtttgtagaaacagggtcttgctatgttgctcaggctggtttcgaactccttacctcaagtcatcctcctacctcagcttcccaaagtgttggggttacaagtgtgagccaccatgcccggccacctgttttttatcctttatattgtattcttactgtatcttttctatgtttagatatacaaccacttcctgttgtgtcacacttgcctgcagtaacatgctgtaaggtttgtggcataggagcagtgggccataccatataatcaaggtgtgtagtaggatgtcccagctgggtttgcgtggactgcagccccgttgttaagggaagcgtgactgtggttaccgggacgcacagtgcacgcctgtgctccgggcacattggtgtgcttatggtgggccctctcctcaggtgtcacatcccggtggctggacatgccctcttgggcttggcagatgccagtggatccatacaactgctccgcctggtggaatctgaggtcagtgacttgcacttgttctgtggggcagaagggacctgaatagagagggttggggaggaggctgtgctgatacagacatttttctaaaacgatctctcttcaatggtgagctatatataaacgttctaagataatgtggagtctatttttaagttgtattgcgttctacatccaactccaagaggaagtcacctcatgtgtcaccagcagaagggctgaagtgacaggatgttcattgacctgtcagtggatctgaaagttctctaaggagagcctgggcaagcattcttaggttgatgctggggcccagagtagcagtgagcatcctgtgtgaagatggcatttctcactgattattggaaaagcacgtgagtcctgtgtgaatttttccgagtttctcacagtgctctggagccatgcattaacaaagtgacttcatctgatagctgtcggggaggagaacggggatgtcccgtagtggggtgatgtaaacagcctgaaaccacgccctcactccgatgcagatgctgcaggcggggctgggccaaccgagggcctgtgtaggaaaaggccttgcttaaggcagcttagagcagttgccctgtcttagaaaggagggaaagagcagccacaggaaagctgtgggcccaagggaggagtgcatgaacccaggaaagggctttggtacagcagcctgctgggagcagggatggagttaagcactggccaggctgtttaggaaatgaaatttatatagatctgcataaagagcaaccacgttctcatggctgctcgcggcttctgaagtggaaaccagaggagtttccccattgtctctgtctcgggaggcgagtgttccagtggccctggaggcctggggtgggaaactgtgtgtgccactgtggtctggagcctgcacaggcatctcgacagcatctaggagcgcaaggatggcaagggggtgtgaaagggagggagaccatgccccaagatcaagcctgtgggaaagttgtcctgcaagtgtgaggagtgtgagctccagtgtccccaggtcttctcggggcccctagcaggggtttcagtgttaggtggaggtgtgactcagtgactgatgtacttcattcgcataggttgtaaatgagggaacgatgacttccctgcaggagaggaaaagtcttttgggggttctggggcggctacttccctttgatggagtttcttcttctccagtagaagagccacgtgctggagccattgtccagccttgccctggaggagcagtgtctggctttgtccctagattggtccactgggaaaactggaaggtaagggccaggcttggtcaggggtcctgagtctttctctgagaaccacttccacttttcaggctagagggctccagccaccttcagcgagctgcgactgtgctcctcagccctgacatcatcactgccagtcctattatgaaaaaaaggtcccccattttagatacatagcgatagtgtttttacctagagaagtcgacactggtgtctttgacaagcttagcagtggttgtgatcttagccgccagtctcttaaggggcatatccgcatcccagggctgtggagaccgtctctcaggacttgtttgggaaccagaagaggctgacgaataacattctgccgggcttcttcatgggttccctgtgtctagggccggggaccagcccttgaagatcatcagcagtgactccacagggcagctccacctcctgatggtgaatgagacgaggcccaggctgcagaaagtggcctcatggcaggcacatcaattcgaggcctggattgctgctttcaattactggcatccagaaattgtgtattcaggtcagtattcctccaccggtcacctctgatggaaggcttgctgaggaaggggcggagggagagagggaggcctgtgccacagctgtgattccagttatgttgggatcttgaagaccttttatggaaagtgtacttttttttttgaaactgagtcttgctcttttgccaggctagagtgcagtggcacgatgttggcttactgcaatctccacctcccaggttcaagcgattctactgcctcagcctcccaagtagctgggattacaggcgcctgccaccacacccagctaatttttgtgtttttagtagagacagggtttcaccatgttggtcaggctggtctctatctcctgacctcatgatgcgcccacctcagcctcccaaagtgttgggattacaggtgtgagccactgcgcctggccactattttttttcttttttggagaatgtactttctggaacaaaggctatagttggcgctcatcacttagctattcttttttttttttttttttttttttttttgagacagagtctcactctgttgcccaggctggagtgcagtgatgcaatctcagctcactgcaagctttgcctcctgggttcacgccattctcctgcctcagcctcttgagtagctgggactacaggcacccgccaccatgtccagctaattttttgtagttttttttttagagagatggggtttcaccgtgttagccaggatggtctcgatctcctgacctcgtgatcctcccgcctcggcctcccaaagtgctgggattacaggtgtgagccactgcacccggcccacttagctattctttttttttttttttttttttttgagatggagtcttgctctgttgcctaggctggagtgcagtggcgcgatctcggctcactgcaagctccgcctcccaggttcacgccattctcctgcctcagcctcccgagtaactgggactacaggtgcccgccaccacgcccggctaattttttgtatttttagtagagacggggtttcactgtgttagccagggtggtcttgatctcctgacctcgtgatccactcgcctcggcctcccaaagtgctgggattacaggcgtgagccaccttgccccgcccacttattctttagagagcaaagtatagcttgcctcaggcagtgcagggtcttgggtggtgttggccagggtgttggaggagcaggcacctgtgggcagagccatcctgcctccctgatatgctcggtgtcagatcctttatgcttttactggaagtccagtttctgtgctttttgcctgatacctgtggatacaatagtgacttcgccatgttggatttcaagtttgtctgcaccctttttggatatagtttatcttccagaaataaaggaagcatgagagaaataagattcctttccaggtcttgtgaatggtttgcatttggggcatgctgatgtgggagtgagaaattaacaactggtgtttccaggaaggaggtagctttggctagcatctctttcccaggtagagataactcatggcaggtgagaggggcgggtctctgagaaaagacagaagaggagctgctgaatttgcaaacagccgaagaaaagatctgacccttccctgctgctacccatccgggccactgtctcatctagtttgttacagcagagcagcaagtgatggccctgccttcattcctgactgttccagtctccacacagtagccaagcaagtgttttaaaaacacacacactttatcgcatctcactcattgttagaacccctcacagttcctgtttcattgaggataaaatccaaaatagtgatgcgattacccaaggcctgtggaatctggtccacgcctgcttctccggccttgttttggctcctatgctctcagtcaccttttcctgaaatagtccacattccctcagtctcagggtttcgtcacgggatgtttccttcatgggtgaattctgcttttttgacatgcccagcttaaaatcttgtccttagaagactgacgcagagcagctgtccttccaccccaggcaggcctcacctccgccgtggctcacgctgcctctgcttgtccgagtgacgagcacgtgtgtaaggcggcgttcttatttgtgttgctcattgtcacagccttgaaccgtctgagagccataaagatctcatttcttgaggtctctccttgggttggttcttctaccttgagctaattcagagcaaaggtaccgtagggcaatgattgaataattctggactgattcattctttcaacaaatgctatgtgctgagccctattctaggtgattagaatactttagcaaactaaacagacaaaagtcctgctttcttttttaagttttattatttttatttatttatttattttgagatggagtttcgctcttattgcccaggctggagggcagtggtacaatcttggctcattgcaacctccacctcctgggttcaagtgattctcctgcctcagcctcctgagtaattgggattataggcacctgccgccatgcccggctaatttttgtatttttagtagagatgcggttttaccatgttgcccaggctggtctcgaatgcctaggctcaagcgatctacctgcctcagcctcccagtgttgggattataggcgtcagccactgcactcagccttcttaaaaaaattatttatataggccaggcgcggtggctcacacctgtaatcccagcactttaggaggccaagatgggcggatcatgaggtcagcagatcaagaccatcctggccaacatggtgaaaccccatctctattaaaatacaaaaaattagccgggcatggtggcaggcgcctgtagtcccaactactcgggaggctgagacagtggaattgcttgaacccgggaggcagaggttgcagtgagccgagatcgcaccactgcactccagcctggcgagagagcaaggctctgtctcaaaaaaaaaaaatttatttatataaatacattttgaggatggggtgggtggttcacgtcttgctgtgtcacccaagctggagtgcaatggcgtgaccacaggtcacggcagccttaacctcccagggtcaagcgatcctcctgcctcagccttctgagtagctgggactacaggtgtgagttaccacacctggctgattttcacataaaagtccctgctttcacccagcttacattctgtggcggggagacagacagtaaacacaaggcataatatgtaatagggaaggagactgcatggcctgtcaggggcaatgagtgctttggaaagaaggtagaaggaggtgagaggggaccaagggtgctgggagcaggtgcagattatactgttggagagcatggtcagggtgggcagtggtcctaaggcaggagtggccctgctatggcagaagagtagccagtagccagcatggttaggatgacctgaggcagtagcggaatagaagagggtgaaatcagaggtaatgggccagggcacagggccgtgcaggctccaggaaggactttgtttcctactcagaatgaaatgggagctgttgcaggatgttgagcagaggaatgacagattctgacttgcattttaaaatttgcgatgacctctttggtgaatgtgagtctagaccacaagagggagggacacagcctggagacttgacattgggcaggtgatgagacagcccagagcaggtttggagtagtggaggtgaggaccagtggttgggttctggatagaagtgaaggtatatccagtcagatttcctgatggagtggatatgtggggcatgcgagagtggagagactcacgtataaagaagcctttgcctactctgtacaaatttgccacagaatggcagctcatacttgaggctcatctgcaggcttcatgcctaggtcagctgattccgctggttcatttaactgtaggtcatgttcactgtgtatccgtagtgtctattatgagggtccatagtgtgtgttcagcaagtacctatttgatgggtggtgggtgggtgggtggatggtgggtaggagggcgtgtgggtggatggatggatggatggtgggtggatgagtgagtgggtgggtttgtggtggatggatggtggatttttggatggtgggtggtggtggggtggatagatggtgggtgactggatggatggatggtggatgactggatggatggatttttggatggtgggtggtagagtttggatagatagtgggtgagtggatggatggtgggtgggagggcgtgtggatggatggatggatggatggtgggtggatgagttggtgggtgtgtggtggatggatggtggatttttggatggtggtggtggtggcgtggatagatggtgagtgactggatagatggatggtggattgttggatggatggatggatggatggatggatggatggatcatgggtggatggatggatttttggatggtgggtggtgggtggtgggtcgtgggtggtggatggtggatggatggtggattgttggatggatggatggtgggtgagtggctggctggctggcttgatagacggggggtggatggatggatttttgggtggtgggtggtgggtggatggatggtagattgttggatggaaggtgggagggcgggtgggtcgatggatggtggattgttggatggatggatggatggatggtgggtgagtgactggctggctggatggatggatggtgggtggatggatggatttttggatggtgggtggtgggtggtgggtggtggatggatggtggattgttggatggatagtgggtagatggatggaaggtgggtggggggtgggtgggggcatgggtggatggatggtggaattttggatagggtgaggtcggggggtggatagatggtgagatggatggaaggtgggtgggtagtgggagctggatgatgcaggggtgggtgatgtggttaggcctagacgttttccttctgatcttcttcactctccctgtgggccctgctcttgagcttcccttccttcaggtgccaccattcaccccatgtctgcattgcttttcttggaagattggttgtggttcagtgcaccaactcctctcttctcccatccttttcgttcccctaaacaagtgctttaagatgacagagggcaccttcctttcaggtgcatggtgtggagtccttgtgcttgctgcctcctgtgtgcagtttctgttcagggctctgatctggcaactcttcttcttagaagccagggctttattcactggagcccttagcaaaggcagtttagcccctaggacctagtaacggcccctgtgaacaatggtcgcctgcacctgatggccttcagggccccttcagtttccatttcctcccttctgttcctgcaggcttctttctgttcccgtccgtctttcccctcctgcttccagtctctagagagtcaaggcacagtgatgactttcctgggggttgtttctgggacctcctgttgaggtggcaacctaagactcctccagcaaagtcaccaggggaacttcctcacagacagagtcaccccggggagcttcctcacagacagagtcacccaggggagcttcctcacagacagtcacccaggggagcttcctcacagacagagtcacccaggggagcttcctcacagacagagtcacccaggggagcttcctcacagacagagtcacccaggggagcttcctcacagacagagtcacccaggggagcttcctcacagacagagtcacccaggggagcttcctcacagacagagtcacccaggggagcttcctcacagacagtcacccaggggagcttcctcacagacagagtcacccaggggagcttcctcacagagtcacccaggggagcttcctcacagacagagtcacccaggggagcttcctcacagacagtcacccaggggagcttcctcacagacagagtcacccaggggagcttcctcacagacagagtcaccccggggagcttcctcacagacagagtcacccaggggagcttcctcacagacagagtcacccaggggagcttcctcacagacagagtcacccaggggagcttcctcacagacagtcacccaggggagcttcctcacagacagagtcacccaggggagcttcctcacagacagagtcaccccggggagcttcctcacagacagagtcaccccggggagcttcctcacagacagagtcaccccggggagcttcctcacagacagagtcaccccggggagcttcctcacagacagagtcacccaggggagcttcctcacagacagagtcacccaggggagcttcctcacagacagagtcacccaggggagcttcctcacagacagagtcacccaggggagcttcctcacagacagagtcaccccggggagcttcctcacggacagagtcaccccggggagcttcctcacggacagagtcacccaggggagcttcctcacagacagtcacccaggggagcttcctcacagacagagtcacccaggggagcttcctcacagacagagtcacccaggggagcttcctcacagacagagtcacccaggggagcttcctcacagacagtcacccaggggagcttcctcacagacagtcaccccggggagcttcctcacagacagagtcacccaggggagcttcctcacagacagagtcacccaggggagcttcctcacagacagagtcacccaggggagcttcctcacagacagagtcacccaggggagcttcctcacagacagtcacccaggggagcttcctcacagacagagtcacccaggggagcttcctcacagacagagtcacccaggggagcttcctcacagacagtcacccaggggagcttcctcacagacagtcaccccggggagcttcctcacagacagagtcaccccggggagcttcctcacagacagagtcacccaggggagcttcctcacagacagagtcacccaggggagcttcctcacagacagagtcacccaggggagcttcctcacagacagtcacccaggggagcttcctcacagacagagtcaccccggggagcttcctcacagacagagtcacccaggggagcttcctcacagacagagtcacccaggggagcttcctcacagacagagtcacccaggggagcttcctcacagacagagtcacccaggggagcttcctcacagacagtcacccaggggagcttcctcacagacagtcaccccggggagcttcctcacagacagagtcaccccggggagcttcctcacagacagagtcaccccggggagcttcctcacagacagagtcacccaggggagcttcctcacagacagagtcacccaggggagcttcctcacagacagagtcatccaggggagcttcctcacagacagagtcacccaggggagcttcctcacagacagagtcacccaggggagcttcctcacagacagagtcacccaggggagcttcctcacagacagagtcatccaggggagcttcctcacagacagagtcaccccggggagcttcctcacagacagagtcaccccggggagcttcctcacagacagagtcaccccggggagcttcctcacagacagagtcaccccggggagcttcctcacagacagagtcacccaggggagcttcctcacagacagagtcacccaggggagcttcctcacagacagtcacccaggggagcttcctcacagacagagtcacccaggggagcttcctcacagacagagtcacccaggggagcttcctcacagacagtcacccaggggagcttcctcacagacagagtcacccaggggagcttcctcacagacagtcaccccggggagcttcctcacagacagagtcacccaggggagcttcctcacagacagagtcacccaggggagcttcctcacagacagtcacccaggggagcttcctcacagacagagtcacccaggggagcttcctcacagacagagtcacccaggggagcttcctcacagacagtcacccaggggagcttcctcacagacagagtcacccaggggagcttcctcacagacagtcacccaggggagcttcctcacagacagagtcacccaggggagcttcctcacagacagtcaccccggggagcttcctcacagacagagtcacccaggggagcttcctcacagacagagtcacccaggggagcttcctcacagacagtcacccaggggagcttcctcacagacagtcaccccggggagcttcctcacagacagagtcaccccggggagcttcctcacagacagagtcaccccggggagcttcctcacagacagagtcacccaggggagcttcctcacagacagagtcacccaggggagcttcctcacagacagagtcatccaggggagcttcctcacagacagagtcacccaggggagcttcctcacagacagagtcacccaggggagcttcctcacagacagagtcacccaggggagcttcctcacagacagagtcacccaggggagcttcctcacagacagagtcacccaggggagcttcctcacagacagagtcaccccggggagcttcctcacagacagtcacccaggggagcttcctcacagacagtcacccaggggagcttcctcacagacagagtcatccaggggagcttcctcacagacagagtcacccaggggagcttcctcacagacagagtcacccaggggagcttcctcacagacagtcaccccggggagcttcctcacagacagtcacccaggggagcttcctcacagacagagtcaccccggggagcttcctcacagacagtcaccccggggagcttcctcacagacatcaacggcctaactgagaacactcatttcctgtcattagtggtgttgatgcttctctttctccacacagggggcgacgatggccttctgaggggctgggacaccagggtacccggcaaatttctcttcaccagcaaaaggtaactgcccaagggccagcactcggtgcccacaccagcccccgcgttccctgggtcaccagccctcccgttccctgggtgggtctgtgtgctggacactggttcagaagccgcctctgcttgcagacacaccatgggtgtgtgcagcatccagagcagccctcatcgggagcacatcctggccacgggaaggtgagtccccaggaggctctcgggcccttctcgtctctttcgctgtccccggggggctcctgggcccttcttccctctttcgctgcctttcctcctggcaccattgcagcatttcgtctgccagtgcttcgccggagtgtaggtatatgggtttggtaaaggggactttgtcctcgagggatgcatgggacaggtctctgggagacgttctgtgccccccaggggccttgtggaacaggtgagcctgggctttccttatatgcctcctgtggttggtcggtttcagctatgatgaacacatcctactgtgggacacacgaaacatgaagcagccgttggcagatacgcctgtgcagggtggggtatggagaatcaagtggcaccctttccaccaccacctgctcctggccgcctgcatgcacagtggctttaagatcctcaactgccaaaaggcaatgggtgagtggggacccgtggctgctgggcctcagggcagggcaccagttccctgccccctcgctctgctgggctcttccctcagctccctgctcccttgctctgctgggctcttccctcagcttttacacactcccagcgtcgcgccctagacttggtcgtgatccataactgtcccagctccagaatctctgctctctaaccacagttttccctggtttcccagctccgtcattccggtgcctcctgcatttcggcagacctctgaccccactgggacctctagtctggaggcttggccacccatcactcccataaccatccttgtctgtgctctcccatgctcttcctgcctgtggtcagctgggactctgtggtctgctgccccctgtgagctcacactccattcccttcatccctttctcacactctgggcagaacccagtgttgttttgttgggaacaagcacctctgattctggttgagccggagaacgtggctggaatcagctgtccacgttgtgttctagtaggtccctgggattcctggtgatctgtaacatttctctaggcagtaatcccccactgtcagaactggttcacattttcttctctctgctcaaacctccaggacctcctcttccctcctgacttgcagctcatgatctctcctctttcgcctcttctctctcccctcactccaaaaataagcaatcacaaaaccacctcatcttcccaccattaagcccaccagcctctcgggccacccacatgctctctgccctctgcagcggtgggtgacccacacctgttcccaaggccagtttcttctctgcactggattgtactcaaggacttgattgactcgatttccgcatggtattcctcttttttttttttttttttgagacggagtcttgctctgtcacccaggctggagtgcagtggtgcgatctcggctcaccacagccttcgcctcctgggttctagcgattctcctgcctcagcctcccaagtagctgggattacaggcacccaccaccatgcctggctgatttttatagttttagaagagatggggggttcaccatgttggtcaggctggtctggaactcctgacctcgtgatccgcctgccttggcctcccgaagtgttaggattacaggcgtgagccaccgtgcctggcctgtattcctctgtgttttgcatctttagtttctccatctcttctgtattgtttctgttagttctgtgaatgtgctttgtatttctcatcgttttttgttttgttttgagatggtgtcttgctctgtcacccaggctggagtgtggtggtgcaattgtagctcactgcagcctcaacctcctggggctcaaaccatcctcccatctcagcctcctgagtagctgggacccccatgccaagccataatatttcttgtattaaaacaatttgagatcttttttttttgagatggagtcttgctctgtcacccagaatggtgtacagtggtgtgatctcgtctcactgcaacctctgcttcctggcttcaagcaattctcctgcctcagcctccagagtagctgggatcacaggcttgtgccaccacgcctggctaatttttgtatttttagtagagacggggtttcaccacgttggccaggctggtcttgaactcctgacctcaggtgatccgcccaccttggcctcccaaagtacaggcatgagccaccgtgcccagcccctgggctcaaaccatccttccacctcagcctcccgagtagctgggaccaccatgcccagccataatatttctcatcttaaaacaatttgaggtcttttttctttattaatggtgatacattttcctctgagcactgcttttgctgcaacccatacattttggtatgttgtatttttattttcattcatctcaaggtactttctaatttcccatgtggtttttttcttcgaccattggttatttatgagtgtgttgtttaatgtacatgtttttaagtgcccacatttctttctgttaccgatttctaatgttattccattgtgcattcctgttgaatttactgagattagttttgtggcctagagtgtggtctctgctggggagtgcccctgtgcacttgcggacgtgtgttctgctgctgttggctggagtgccctgtaggtgcctgtgaggtctcggctttataatgttcagatcttctggttccttactgaatctcctgtctgggcaatattgaaagtggtctgttggctgggcacggtggctcacgcctgtaatcccagtactttgggaggctgaggtgggcagatcacaaggtcaggagatcgagaccatcctggctaacatggtgaaaccccgtctctactaaaaatacaaaaaattagccaggcgctgtggtgggtgcctgcagtcccagctacttgggaggctgaggcaggagaatggcgtgaacccaggaggcggagcttgcagtgagccgagatcgcgccactgcactccagcctgggagacacagcgagactccatctcaaaaaaataaaagaaagtgggctattgctacctccaactctaactgtagaattatgtatttccagcctcgtttccatcagtttttacttcacgtattttggggatctcttttatatatgtttataattctggtatcttccagatgtgctgacccttttatcaatataaagtgtctgtctttaaatctagtaacattttttgttttaaagtcagttttgtctggcattggtaaagtcacttcagtgtggcgtgatgcatcgttttcattctctttcagttcacacctgagtctgaggcgagtctttggtatggggtcatgcttttttttttttttttttttgagatggagtctcgctctgtcacccaggctggaatgcagtggcgctatcttggctcactgcaacctccaccttccgggttcacgccgccattctcctgcctcagcctcccgagtagctgggaatacaggcacctgccaccacgcctggctaatttttgtatttttattggagacgaggtttcaccatgttggccggggtcgtgcatttttgccaggaaacctgtgaaagtggcgctgtgccctccttagttcctcacatcaagggcctatgatgccacattgttccatttttgtgaaatttggtcactttgttaaggtggtgtttgccccaatcccttcactgaagagatactattttcctctttgggattaatcagtaatctgtggtgagaatctttgaacctgtgtcaataactcccttttcagacttttacccaattcagagacaattggtgcttgaataaattatggtaatggcaaaatggtgattttctttttttcttttttttttttttttttttgagatggggtcttgctctgttgccctggctggagtgcagtggcacgatctcggcccactgcaacctccacctcccgggttcaagcgattctcctgcctcagcctcctgagtagctgggactacaggtgcccaccaccacgcccggcaaatttttttttttttttttgagacagagtctcactgtgtcacccaggctggagtgcagtggtgggatcttggctcactgcaagctccgcctcccgggttcacgccattctcctgcctcagcctcctgagcagctgggactacaggcgcccaccaccacacctggctaattttttttgtatttttagtagagacggggtttcaccgtgttagccaggatggtcttgatctcctgacctcgtgatccgcccgcctcggcctcccaaagtgctgggattacaggcgtgagccaccctgcctggccaattttttgtatttttattagagacagggtttcgccgtgttagccaggatggtcttgatctcctgactttgtgatctgcctgcctcggcctcccaaagtgctgggattacaggtatgagccaccacgcctggccatctcttcccattcttaatggcattttttcctactcagaacacagcattaacatattatttttctgtccttgccccacctgttttttcctaagtctcagctcgcaattgactatttgttgtgctcccatccatcctggtgacagctgttcccagccaccgcctgtttggatagagcttgcctcctgagagacgcttaggagaggccctcggtggtgtttcctagacttctgaatacttgatacttttctctgtagccttgataattgaaggagaacttgcccattaatcccttgacttgcatttcctttgcttgagtttcttaaacacactccagcattgtctgttgggcacacactgggtctcctgccttttaactgcttttgtaaaaattgtgataaaatttatgtaacataaaatgcatgattttagccactttaagtgtgcaatttagtgcagggaccagccccacagggtcagtgggcttctccctgtgtgcggcgacgagagagtgtagaaataaagacacaagacagagataaaagaaaagacagctgggcccgggggaccactaccaccaatgtgcagagaccggtagtggccccgaatgtttggctgcactgttatttattggatacaaagcaaaaggggcagggtaaagagtgtgagtcatctccaatgataggtaaggtcacgtgggtcacgtgtccactggacagggggcccttccctgcttggcagccgaggcagagagggagaggagagagagagaaagacagcttacgctattatttctgcataccagagacttttagtactttcactaattgactactgctatctagaaggcagagccaggtgtacaggatggaacatgaaggcggacaaggagcgtgaccactgaagcacagcatcacggggagacggttaggcctccggataactgcgggcaggtctgactgatgtcaggccctccacaagaggtggaggagcagagttttctctaaactcccccggggaaagggagactccctttccaggtctgctaagtagcgggtgtttttccttcacatttttcgctaccgctagaccatggtccgcctggcaacgggcgtcttcccagatgctggcgtcaccgctagaccaaggagccctctggtggccctgtccaggcataacagaaggctcgcactcttgtcttctggtcacacctcactatgtcccctcagctcctatctctgtatggcctggtttttcctaggttatgattgtagagcgaggattattataatattgggataaagagtaattactaccaactaatgattaatgatattcatatataatcattatctaagatctatatctggtataactattcttgttttatattttattttactggaacagctcatgtcctcggtctcttgcctcggtgcctgggtggcttgccgcccacaatttagtggtattaaagacattcaaggccgggcgcagtgtctcacgcctgtaatcccagcactttgggaggctgaggcgggcggatcacctgaggtcgggcgcctgtagtcccagctacttgggaggctgagtcaggagaatcggttgaacctgggaggcggaggttgcagtgagccgagatcacgccactgcgctccagcctggcgacagtgacactccgtctcaaaaaaaataaaaaataaaagaagacattcaaaatactgtgcaatcatcactgctacttattttcaaaacttttctatcaccccaaacatccctcccccagcctctataacctccgtttactctgtctatggggatttgccttttctagatatttcatggaagtagaatcgtgtgtctttttatatccggcttctttacatagcttaacgttttcaaggttcacccctgttggagcatgtgtcagaattctctttttaagaaggtaatgatggaccacattctgtctgttcatcctctgatggacatttgggttgttttcaccttttggctatggtgagtttttagttttttttttaaagagagggtcttgtgtcctgtcacccaggtgggagcgcagtggtggagtcagagctcactgcagcccggaccacctggacacaagcagtcctcctgcctcaactcagtcctcagtgtcgggattacaggcttgagccactgcatccagccttcagttcttaaagttgaagaggtgaactaagacaggtctgagagttcaacattccaggccagttttgtcaggtactctgtataggcctttttttctttttctttcttttttgagacggagtcttgctctgtctcccaggctggaatacaatggcacaatctcagctcactgcaactcccaccttccgggttcaagcaactctcctgctgcagcctccggagtagctgggattacaggtgtgtgccaccacgcctggctaatttttgtattttttagtagagacgaggttttaccatgttggtcaggctggtcttgaactcctgacctcaggtgatcaacccgcctcggcctcccaaagtgttaggattacaggcgtgagccgctgtgctcggctggcctttttcataactttatttatgtatttttttgagacagagtcttgctctgtcgcccaggctggagtgcagtggggtgatctcagcttactgcaacctccacctcacaggttcaggggattctcctgcctcaggctcctgtgtagctgggactacaggcatgcgccatcatgcctggctaatttttgtgcttttagtagagatggggtttcaccatgtttcccaggctgctctcaaactcctgccctcatgtgatccacctgcctcggcctcccaaagtgctggaattacaggcgtgagccactgcacccagcctgtatctttaatttaaacaattttttttttttgagacagagtcttgctctttcacccaggctggagtgcagtggcacgatcttggctcatgcaacctccacctcccacgttcaagcaattatgctgcctcagcctcccgagtagctggtactacaggtgcatgccaccacacccagctagtttttgtatttttaatagacacggggtttcaccatgttgaccaggatggtctcgatctcttgaccttgtgatccacccgccttggcttcccaaagtgctgggattacaggtgtgagccaccgcgcccggcctaattttaaaacaatttgtattgtctgggtgcggtggctgacactcgcagtcacagcactctgggaagggtgggcggattgcttgagccgggagttcaagactagcctggacaacatagtgagactccgtggccacaaaaaatagaaaaaactagggggcatgatggtcgcagctactcaggaggtgaggcaggaagacagagcccaggtcagtgcactccagcctatgcgacagagtgaggtcctgtcttgaaaataaaaagagggaggaaacgttggcctgtggctaatcagaaagggcctcccattcttggggtcgcaacagtgtcttccgtccactcattcgctgtctttttcccaggctgtggctctctgagggcttagactctgccttattaccttttcctaagctgtagaagaggtcctgctggcccgagtggacgtgttgagcgattgctggatgaaagactagcggaggtcctgcctgccctgtgacgctacctcccaagggacagtaacggcctccccaggggcttcctcccgagggtcgccccacacatgctgctcgagggcccctgtggctgtctctgaacattcagcatctcactcctcctcggagccacctctgcccagttgaagccctgggcccagggttgggcctccccggcccaggcccatacaacctcggcacgttttgtaatccagtgcggtcctgttctgccctcagcccttcttccatcagcactcattctggttctgattccggtcactgctggcatcaatccctgtacttcagaggtagcgatggcagccctttcagagcccaagtggccacccagccttgcagcccctggctcaccttccacttgctctctgcaactgcccctgccagccctggccttgcctcctggactccagatcgcctcgggtttggccacgcctcgtcattccctctgttgctgtgtgctctgggaggcagttgtggcctctttccagttgccgtagcaacttctataaagaaactgctcacttaaccttgtcagtggctcctttccaagccagaatccagactctgaaacagggcgtgccggaccctgcatgcttgggacgctccagcccactgtcactcactgacagtgccatggctgcctgtttgtggttccccgtgcgagccttggactttctcacctctgctgtacacatgctgcctgttcctcagacatccccttccttcccagctggctaaaactcctttgttctttggttttaagtgttaactgaggtctttccccctctctggcttttgccgtattcttcaccatcaagtgaggttctgtagccccgcttgatgcttctcttggaggcacacaggcgtgtgcactgcaagatgacggtctgtttcttctccaacatatgcccaggtcttgctggttcctttgcatgacacaacggctcctcaggaaacacttgctgacctgtgaggggctgttcttggagtctccctgtcaggtgtgacaggttggggagaggctctgggtgatgttgtgtttcctgggttctcccatctctcactccagaggagaggcaggaggcgacggtcctgacatctcacacattgcccgactcgctggtgtatggagccgactggtcctggctgctcttccgttctctgcagcgggccccctcgtggtcctttcctagcaacctaggaaccaagacggcagacctgaagggtgcaagcgagttgccaacaccctgtcatgaatgcagagaggataacgatggggagggccatgccagaccccagagtggaatgaagccactcacagagggcatgaggaagaatggcacctggctgcaggctacagcagccaccacacgtgactgtggcgtgaacccagaagaagcagactcagccttcagcctcctggccacctgctccttctatgaccatgcgctccacctctgggagtgggaggggaactgagcttgaaatcatgaagccccttcccacaaggaaaccaggagggagactgcgagtgagtgcccgggaccacctcatcagagatgcttactgcagccctgcaggtgcctgtgcactgatggaatccacagtgtagtcagaaaagctgttgacttctcttaaatcagcttccctgctgggcccctgaaagtggactgggtgattctgtctggcagagagtggggaaaagacgcggtttccagcttgcagatttgttaagtttctcaggcagattttgactttcagcctttcatacttgtttaagcaactatttgtattaaatgaagttttttg

SEQ ID NO: 6 - protein, 452 aa, Homo sapiens
MMGCFALQTVDTELTADSVEWCPLQGCRHLLACGTYQLRRPEDRPAGPQNKGGMEVKEPQVRLGRLFLYSFNDNNSIHPLVEVQRKDTSAILDMKWCHIPVAGHALLGLADASGSIQLLRLVESEKSHVLEPLSSLALEEQCLALSLDWSTGKTGRAGDQPLKIISSDSTGQLHLLMVNETRPRLQKVASWQAHQFEAWIAAFNYWHPEIVYSGGDDGLLRGWDTRVPGKFLFTSKRHTMGVCSIQSSPHREHILATGSYDEHILLWDTRNMKQPLADTPVQGGVWRIKWHPFHHHLLLAACMHSGFKILNCQKAMEERQEATVLTSHTLPDSLVYGADWSWLLFRSLQRAPSWSFPSNLGTKTADLKGASELPTPCHECREDNDGEGHARPQSGMKPLTEGMRKNGTWLQATAATTRDCGVNPEEADSAFSLLATCSFYDHALHLWEWEGN

SEQ ID NO: 7 - DNA, 46261 bp, Homo sapiens
  CDS (24553)..(24664)
  CDS (27063)..(27148)
  CDS (27503)..(27646)
  CDS (30452)..(30679)
  CDS (31469)..(31521)
  CDS (37070)..(37185)
  CDS (41621)..(41765)
  CDS (41906)..(42025)
  CDS (42437)..(42521)
  CDS (43912)..(44127)
ggcggcggcggcggcggcggcggctcgggtggctgcgctgggaggcggcggtgagaggctcgcacgcctccagcccggccccggccccccgggagggagagccgagcagccccggctctgggctacggactatgggcgaatagctctgaccacccggcgaaggtgagggcaggggtccaggagcggggagccgggtgggggttgcgggtaggcggggcgggccccggcggccgcggcggtggaatcggagtgacagcctgaagccatctgagtgcagcagaaatggccccggcgaatgccccctcctccgctggggctctgcccttccccggcggcaggggcgagggctgcctcgcgccgggtaccgggaggccgcgggagcttcagtccccgccgcagctctgggaagtgggcactgccagctttgcctagagtcacccagccagtgagtgaagcaaccggcgtgtgaatccagccagatctttccaaaaagacaccttctgcctctccgtgtttccctcctaatcccgagggtgacttgatagttagaacgagtccccagggagggccagccagggcttcctccaagagccctcactctggcacgggcgctaccgctgctggggaattttcatatcccgggcggcgttcaggtacgagtcacagctacctgcttgccaaggccacgtttggccggccttttccaaggagagcttgctgtggtcagtgtttcacctgccgagccggtcaggcccgcccattcccacgccacttggccccgccttccagccagttaggtagggacattcggattcctgatgccgagttttctgcccaccccaatccccaggtttgaagcccttttgttagcggaaggaagagatgacagccgccctctgtgtggcaggatagactttgctctgttttaagtcactggaggaaaccggttggctttgctttggttttgagaaccagtggggaagagggtaggcatactgggctgggcgcctttccctctttgagtagttttgcgtgagataaggaagagcagaatgtgtaattgtagggccaaaataatcttgtttgtaaacagtgcctgtgagctcctttagtgcttcctaatggccgtgctgtgcaagttgttggttgggttaatctagacagtcctcattcattcattcattcatttctcacatgaccacaacaagagtccttgcctagaggcaagtgctagacagcatagtggttaagagtaggctttggagccagacttcctgagttcaaattctggctcagcaactttccagctgtgtgtacctgggcacattgcttagtctccctgtgcctcagtgtcttcgtctataaaacaaggatgataacagagagagatattatgaagagtaaaaagttaacatgtaaaacatacaaccatgtttgccacgtaataagaattcaataaatgttatctatttttatttcaaggagcatacagtctaattaagggaaattgacctgtaaacaaatggttgaaatgtggtctaaagaagctagtagtggctgggcgccgtggctcatgcctgtaatcccaacactttgggaagccgaggcgggcggatcacctgaggtcaggagttcgagaccagcctggctaacatggtgaaaccccatctctactgaaaatagaaaaattagctgggcatggtggcacaggcctgtaatcccagctactcgggaggctgaggcaggagaattgcttgaacctatgaggcagaggttgcagtgagccgagatcaagccagtgcactccagcctgagtaacagagtgagactctgtctcaaaaaaaaaaaaaaaagaagaagaagaagctaatagcagcagcaagagagtactgtgggagcccagtggagaaagggagaaagctgtgagctcagccttgggggtggggtggggacgggagtgtgccatgaaaaggcttggcagaagtgatgctggagctgagtctaaaaggagaggaggggaggcttagccaggtgagaatgaatactttgagagcgagatagacaaataaactcatagtttattccagaaatctcagattgttcaatctagtggtatggaagttgatatggtgcaagtgaagcagtataggttcatgaaagaatgccatattagcaatttgagatatcatgcccagggcagccgggagcaagtgaaaaggtctgaagcagaggaatgacatgattggttacatattttagaaagatttcactggagtcccagtagaggagggaaggaggaggacaggagcgactgaagggctggagaactcttcggagacaaacctaggcttctgagagaggagagttggtgctggggcgatggatctttgctgaggaagcaccatgtgcaaccagtgccagatggcaagctcctgcattggcctgggcttctctgcctggcgcagaagtgcctggcacatgtgcccctctcttcctgggattgtaggttgcttgagcagctggagagataagactgccctctcagaaggccagttgtaaagggtgctgtgtttgctaacttgtgcttttaatctgacctttggggaaggcagtagattgtaatagttaagaggttatttgaggccgggtatgatggctcacgcctgtaatcccagcactttaggaggccgaagtgggcagatcacctgaggtcaggagttcaagaccagtctaacatggagaaaccccttctctactaaaaatacaaaattagccggacgtggtggtgcatgcttgtaatcccagctactcaggaggctgagacaggagaatctcttgaacctgggaggcggaggttgcggtgaaccaaaattgcatcattgcactccagcctgggcaacaagagcgaaactctgtctcaaaaaaaaagcttatttggctctgccatcagacagatctgtgttctacttctatccctgctggtcactagggattacttattctctccaccacagctttctcatctgtaaaatggggacaataagagtaccttcgtaatagggcagttgtgaggagtaagtaagatgttacaggatgagtacttaacagacactgagtagtaaatgttagctcttattacaggctacaggaaagaacttttaggaattagttgcagcaattcatggcaactagaactatgtcccattgagctgtcagaagtgtcctgagggatcacaagatcacagagttttattttattctttctgaaaagaaaatctaaggggagtttacccagtctgtatgggagccatgcagatgattcagtttggctctttaaaagaactatttttaaaaatagaagtaggactgctgagaaaaaaatagtactttaaagtatacatgggttggccaggcgcggtggctaacgcctgtaatccctgcactttgggaggccgagatgggcagatcgcttgagcctaggagttcaagaccagtctgggcaacatggcgaaacccgtctctacaaaaaatacaaaaattagctgggcatggtcatacgcacctgtagtcccagctactagggaggctgaggtggaaggatctcttgagcccaggagatcaagggtgcagtgagccgagattgcaccactgcattccagtttaggtgacacagtgagaccctgtctcaaaaaaaaaaaagtatacatgggagtaaatgtatttagaatttcttctctgtgtgtccctgctagcaaccctagtctggtacctgaataagcagcatcaagaggcatcacacacactgatgagtgtggtagctcaaaatacagagccctgattccacatacatgagctcccatgtgtggctggggctctgctgggtcctgggggcaggaggaggatggagaggcaggccctaccatggaggaggttgtgatctaggggcaggctcctaaccagttaacatgtgcacagtttggcaagtctctcacagaagtctatagcatgtgggggaacccagtggaagaagtgatcgagctctaggatgaggaggagactggggagaacttcagagagcccttagaacttgaactgggactgggcacagcagctcacacctgtaatcccaacactttgggaggccgaggcaggaggatcgcttgagcccagaaattgaagaccagcctggccaacatagtgggaccccatctctacaaaaattaaaaaagaaaaaaattagttaagcgtggtggcatgtacctgtagttccagctacttggaaggctgaagtgggaggatcacttgaacctgggagttcccaactcccagtaagctgtaatcacaccactgcactcgagcctggacaacagagtgagaccctgtctcaaaaaaagaacttgaattggatcgtgaagaatgaatagagttttctgggggtctatgaagccctccaggcagggggagcagcctggcacaagcacggatatgtggtaatttgtgtggcactttaggaaccacaggagttctagcccagagtgtgaagggactgactgcaggatgtgcctgagaggtaggcaggcactagggcgcagatgcttgaattttgtattctgttggtgatggatgccttgcattaagtggaggaaacataccattagacctgcatctgctttggaggatggagtgggttggggagaggttggagtccccataggaggctgttgcagtaatcccagcaagggctgagaggggcttggatcagggcagaggcaatagggttgagaagaagagcagagatgagctgtttggggggaaatcaactggactctgggagtgtttggaagtgatgccagagggaggaggaatggtgacaggtaaccttgaggtccttggtttgggtgacagagtgaatgatagtgcagagatagggatggctcaaggagaagataatggccagtgaaatctgccagcttcgttcagtaaaccctgggcacaccctctcgggagaggatcagttggaaggtcttgtagacccctgtctggacttgggccaggcttccctttgctttcgcctgaatcagcacctgggagaagggcagctttccttccttcacctttcctctgcccagatttaaccagggaggtgaacctcttcatgtttcacatctataaagcgataaatcttcagccttccaatagccctaagagcaacccttccctctggcaatatccaccccgattcagcatactacagcccactgatggggtcctgaacagcagagaccctcaggggagagaggctttctcagtgccccctggagatcttatctagagagaggtctggaaattggatttgctgcctgaagctggctcagcagattcagtccttcttctcaggaaggactgatatctgccagaggccacccaggacttgctcagaaccttcagggaagggagagaaagctgcccagtgtccttgacccttgaagttctaagggagccagaagctgtccctcagctggattggactatagtgaggggtgtgctggtgggcgggccttcaaacaggccctttggaatttgggagatttttttacatgatttgtccttgggtttgtggtgtaaagaaagtaaacgagaaaatgatctgaaacaagagcacttctttctcctccacctgctcaggtgagactctgacctcgaaggtagtcgagggcccacagcagcccccgcatatcctcccaggctctgtaatcaagatcctagaggggaaaggatgcaattgcttgctgtgatttacttactatcttagagatagttccactttggcacatgcaggtctgggtcatttgtggctatgatgtgtcccactgtgagtgtaatttattcaacaagctctctgctaacaaacacttgggttattttctgcattctactctctaaacacttctgctgaagtgactttcttcatacatatgattttgcccaccttaggtatcatctgcaggataaatttctagaagtgaattgctgcctcaaagactatcctttattattattattgttaaagaatttctaggtctccttttaataaattggggcagccttatttttcccccagcaagtgaatctgttcttttgggttgaggtcgtacgtcctgaggggaacacaggtgttcccactccctaaagaggctacaacccaggccgggcgcggtggctcacacctgtaatcccagcactttaggaggccgaggcaggcagatcacgaggtcaggagatcaagaccatcctggctaacacggtaaaaccctgtatctactaaaaatacaaaaaattagccggacgtggtggtgggcacctgtagtcccagctactcgggaggctgaggcagggaatggcgtgaacccaggaggcggagcttgcagtgactgccctccagcctgggtgagagagcgagactccgtttcaaaaaaaaaaaaaaaagaggctacaacccaacggtgttcattctctcctggccatgacagtcagtcttgggtgtgagttcaggctccccagaacttagcagtctacaggcctgacggtttcaaaggaactctagttgttggaaagcaccagaggtagaaaaactgagaaggggtcttggcatgcagaataaagctgtcccctctaaatatgtttacacactgccacctacttggcaaaagagatagaagatcttcagcctttaggaagtctggatgcaagggtccagaaggaagagagagtggactggtcattgtagtgggaattggcaagagcaggactgatgtgcttgtcatttctctctggggcagagctgatgtgaggtgtgttgaggggacagcagtgcttctagggagaagctcggttcagcgccttggggaccttgggcctggtgtagcccagcattccgtggggcttttggaatcctgttgctggcatctgccaaccctggggagcaagagtcctgctactttttgcaataagtatggcgcttccagcattactgagtttggggtaagtttcatagtgtgtgttcttttctgactcctggagtggtcccttctgaaaaaacaggaaggaaaccagcaaaaaaaggaggcccggctggcacggtggctcacgcctgtaatctcaacacttcgggaggccgaggcgggcagatcacgagttcaggagatcgagaccatcctggccaacatggtgaaaccacatctctactaaaatacaaaaaattagccaggcgtggtggcgcacggctgtagtcccagctactcaggaggctgaggcaggagaatcgcttgaacccaggaggcggaggttgcagtgagccaagatcgtgtcactgcactccagcctggtgacagagcaagactccgtctcaaaaaaaaaagaaaaaaagccccaccacctcccaggtcctttgtaatactgcaatacgttattgaatctaaggaagtaagggttgtctcttattttacagagaacactcaggctcagagcggggtaaaaagactgtctactattacacagccagtaagggcagagctgggatttccaactcacatttgtgtgactctaaagcccatgttcccttcctccatcctggctaggctctggtcccagggagtccagcccacatagaatcttggactcatagagccagccccaaagctgaaccagtccctttttttgcctgaaaaatggaaactgccactgccttgagacaggtccctccctgacctgccctatgggtagtgggcaaggagacttgcaaccatgcagttaagggcctaggctcagatcagatgtggcttcagaacctgaagtgagtgaccttgaacaagtcacttcctgtctccaaccccagcttcctcctctgtaaaatgggcataacaattcttgcccttaaggtagtcatgagacacagggctttatagcctctaccacgttcagcctagtgcatggcaggcaggcaggacccaggggccagctccagcaaggcccaggtgagctcttggcagtgaacctgtgagtgtaccaaaagaggcatcctgagccagttttcagcccttatggatgccagggggcaggcaggaagttccttataggcatgtttgcagcctatctggagagctgcaggggtgttgtctttgtccttctgcctctcactcttttgctgcaccattgcattggcacacaagctcacacatccagggcacttatgcttacacctcttcccaggccatactctctcaagtctgccttctctgaggctcagcctcccctgattccactactactttttttttttttttttttttttttgagacggagtctcactctgttgcccaggctggagtgcaatggcatggtcttggctcactgcaacctccgcctcccaggttcaagcaattctcctgcctcagcctcccgagtagctgggactacaggcgagtgccaccacacccggctaatttttgtatttttagtagagatggggttttaccatgttggccaggctggtcttgaactcctgacctcatgatatgccacctcagcctcccaaagtgctgggattacaggcgtgagccaccacgcctggctccactactactcttaataattctaatgggttcagaaaatctttagattttaaaaaagtattgttagtttaatagtttatggtacaatagttaaataatatgggagaatataaaataaagctctccctcccctccttgggcccttagttctattgactggaggtgtccacttaaatttcttctaggctgggcacggtggctcatgccagtaatcccagcactttgggaggccgaggcgagtggatcatgaggttaggagttcaagaccagcctagccaagatggtgaaaccccgtctctactaaaaatacaaaaagccaggtgtggtggtgagcacctataatcccagctactcgggaggctgaggcagagtattgcttgaaccggggaggtgatagttacaatgagccgagattgtaccactgcactccatctcaaaaaaaaaaaaaaaaatttcttctagaagttgcctatgcgtattcaaaagtgtgtataatcttttttaacccaagtaggattatgttgtacatatattcctgcagtgtgcttattttggtaacatagacatctttatcagcaggtgtggacctagtcggaaaggctgcatagtatccattgtctagctgaacataattagttaaccagtcctctctggatggccatttagatagtttcctgccttgggggcatgtgtgtgtgtgtgttgatttttatggttttgttttttgctgctacacgtggctctatagggacttttgttgagcacattatctttgtgaacctgtgtgagtatatctgcaggatccatccccggaactggcattgctgggcccaaggcaggtacattttctttttctttgttggctatggtttcacaccttttttctgcataccttctgggcttgtgcagagcctgggaggcctgaggtggaccagacccttctcgagacctacatataagcagacaggtaatgaacacgccctcaatgcatggacatagtctttcactggtggctgctggccctcgtgatctgccgtgtccagctcttggtgattcagagcaggtgaagccaacagaggggcactctgaagggatcgcctgctcttggcttttctaatcataccaggcagcctgttgcccctctgagcagccatagccctcaacattcagtcaaacttcagaaagtgaattgtattgctcgctgtcaaagtcgtgaatttttttttttttttgagatggagttttgctcttgttgcccaggctggagtgcaatggcgcgatctcagcgcactgcagcctacgcctctggggttcaaatgattctcctgcctcagcctccctagtcactgggattataggcaagcaccaccacgcccagctaatttttgttatttttagtagagacagggttttgccatgttggccaggctggtctcaaactcctgacctcaggtgatccacccgcctcagcctcccaaagtgctgggattacaggcgtgagccaccgcgcctggcctaaagttatgaaatttaatttaatttttaacagaggcagttaaggaaaggcagtttgctggccccagtccagactgcctttctcacaggataattgtggtgatttttgctgttgaaaacagtataaagagaagcgcagcacctaggtctggcctggctgggctttcctctctatcactctggaaatctgggatagaaagaaggaaacataacatttctctttttttttttttgagacagagtctcgctctgtcacccaggctggagtgcagtggcatgatctcggctcactgcagcctccacctcctgggttcaagcgattctcctgcctcagcctcctgagtagctgggattataggcacccaccaccatgcccagctaatttttgtatttttagtagaaatggggtttcaccgtgttggccatgctggtctcaaactcctgacctcaggtgatcaacctgcctcggcctcctaaagtgctgggatgatagacgtgagccatcacacctggccaggaaacgtaacatttctaagttaagcgtctagtgcctcctatgtactgggccctggcaatcctgaagggaaccctttttgggagtagcgctgtccctgtcctccagatgagaagactgcagagcagagaagcatgtgtccaggtcacacagtggacagaatggtggcttttagaatcaaccagttgttctgcggttgcttgctgctttctccttgcctgatttgggctatcatgggtggtaagaacttgaactccacatgggaccccatggcaggccttattccaggactgagtcactgcacaaagcaacaactgatggttggagctgaagggactcttagtcacatgcccatgccaggacctcccttgttgcaatctcctcttctagtccaaatgagccagagcaggccagtatgacagggaagacctgccagtgactcagtctgccgtcactgcgcatggcagaaggcaccctgaagagccaaggggccaccgcaaacatccctaagccagggtgcttggctgctttcccaggctacctctctggatggagaggccaagccagtacggcccagagaaagagcttgtaagtctgtcccttcctcctctgacacccacacacagtgacagattatttgttgtcacatcagctgcttccggaggcccttgggaggggagagctggtggcagggctggcaatgctgccctggattctgctctggtggctctcagtgtgactgctggtgaagccctttgctcccaggagcagccggtctggttcagggctatggggaccggtctctaactccatgtattttttccccaggagagcctgcagagaaagcttctctctacctctgtgtgcacagccctgagacttttcttccagaatttctctgggatgcacccccttggccaggggcctttagcttctaggctttctttgcagcctccaaaggaggtcacagaaaagcccagtggggacttcctcggggcagtggggtgaggagggatgtcactgattacgcagtctccttatgtggggctaactcatgaaccttgcttcctggaggagactagagctaggtcaccaagctgcagaccctggactttcaggccctgcctggcccccaggcctgctgtgctcagcacattggagtcctgctgaggaaaggcagcggtggcagaggatgtgctgggggagcaggctgggcgcagggccctcttgctgaccgcccctcccacttcccactgggctgagtcacttcctctctggctgcagcaggtactctcccacaggctgggagcagagcaggcctcagggggtggggtcatcctatacaaagagagctctggttagaagcagccagttcacttataacccccaaggcaataaagtgcagcatttggagatgtgatattatgcattaaatgatgtgatattatgtattcttgacaaattggagctatacatgtcctgcgttttaaaaatgaacaaaatcatcgctctgttttggagcagtgaagatgacagcacatgcatgaatctttgtcgtcagggagtcctggctgaaatcgagggattactaatcctcctctctatccgcctccccagcctgtcagcatctgtcctgagcacaaagcaaatggcttccaatgggttcctaaggagattgctcatagccaccaagctcccggggagagggtgcatgccttcttcagggatggctgtcattcagactcagtggaaaagccctcaccagagcctcaacctgggccacagtctttaggctttgctttttcaataatagaaggggagaatccacatcagaaagtggtgcgagttaaagagagaatctgggaaacactgggaatggtttctggcaagcggtgggtgcccatcaaatgataatgaaaaaaagacatacctgcagagacttgccacagggaagcggcctcagcacggagcagggagcacccacccttcacccagcaaagacctggtgacaccgccagccacagcatcattcagctgtcctgtgaaggcatattaccatctctgttttacagatgaggaaactgaggcccctgaagggtaggtgactagtgtagagtcacaaaataagtgagtgtcagaagttgaaatttgagcccggacctccatgacccccaaatccatcttgctatcccagttggcatttgcgtaacttgtccatggcttgaaacccttggttctctgagctgtgaattcctctgggtttcctggactgcctttgtggatggagagcaggtctgtaggtatccctggtagaagcatctacatgtgagtattaagtgcatcaggggtggcgcccagagtgtttgtgtcagggaagggtgggggatgctgcctgttggctggtggagggatatctcagtaacccacctctgactcagcccttttctccagagaggccccgctcggcagcccctgaaatgcctcattctgagggaagcatgacctctctccctccctgctcacctgcagctttctggcttgacagcaccctggttccaggagaatgattgtttataagtaagtctgtgcttggcatgcctggaaccatgcagacattgggtggagaaggggcagttgaggaagcagtgcagtcagggaaaaagaatatgggattcagcattgaaaaagctgtgtttatatcccacctcttccaacagctagccaggtgacttcaggcagctctgagtctcaatttcttttttctttttctttctttctttttttttttttttttttttttttgagacaaggtctcactctgtcccccaggctagagtggtgctgtcatggctcacgcagcctcaaactcctgcgctcaagcagtcctccaaactaagcaagctaaaactcccaagtagctgggtctaccagctgtgccagctttgaactcctgggctcaagtgatcctcccacctcagcctcccaaaatgctggggtaacaggcatgagccaccgtgcccgggctcaatttctttttctagaaaattttgtgttgtgtgtgtgtgttgtggggaggtgatcagttatcattatgtaccagccctccacatccgtgggttctacgtctgtggattcaaccaactgcggatcaaaaatgttcaggaacaaagaaggatgcttgtgtctggactaaacatgtacagacatttttttctttctttctttttttgagacggagtcttgctctgtcacccaggctggagtgcagtggcgtgatctcggctcactgcaaccttcacctccaggttcaagcaattctcctgcctcagcctcccaagtagctgggactacaggcaaacactgccacgccctgctaatttttttgtatttttggtagagatggggtttcaccatgttggccaggctggtctcgaactcctgacctcaggtgatttgcccgcctcggcctcctaaagtgctgggattacaggtttgagccaccgcacgcagtcctttttttttttttttttttttttttttggagacagggtcttgctctgtcacgcaggctggagtacagtggcaggatcacatgatctgtgattacacaggcatgacccatggcacccagccagactgttttttcttgtcattatttcttttttttgagatggagtctcgctctgtcacccaggctggagtgcagtggtgcaatctgatctcggcccactgcaagctccgcctcctgggttcacgccattctcctgcctcagcctcccgagtagctggcactacaggcgcccaccagcacgcccggctaattttttgtatttttagtagaagcggggtttcaccatgttagccaggatggtctcgatctcctgacctcatgatccacccgcctcagcctcccaaagtgctgggattacaggcgtgagccaccacgcccggcccttcttgtcattatttcttaatacagtatagtaactacacagcatttccgttgcattaggtattataaatctagagatgatttaaagtatatggggctgggtgtggtggctcacgcctgtaatcccagcactttgggaggcccaggtggacagatcacttgaggtccaggagttctgagaacagcctggtcaatatggtgaaaccctatctctactaaaaatacaaaaattaacttggcatggtggcatgcacgtgtaatcccagctactcaggagcctggggcatgagaaccacttgaacccaggaggcggaggttgcagtgagccgacatcttgccactgcactccagcctgggtgacagagcaagactccatcaaaaaaaaaaaaaaaagtgtagtacgggagtatatgcacaggttatatgcaaatactacattatcttatattagggacttgagcacccttggattttggtatctgtcagaggtcctggaaccaatcccccatggatattgagggatcattatattcacaaatgctttgtaaactataaagccatgtgtaaaaattagttctgatagttaatctgagagtgtgagccgcccttgcaggttttaagtctgaaattcaccacccagagaggtgcgcaggaatctacaagagacctggcagccacctagtgtgcacgggtggtctgcagagcgtgggtggtgacctcagttgcatcgcgcattcagatttcacatcactcacctagagtgttgtcatttcaccccaggtgtagtcagataaatgcatggttaggccagaagttctcttttcagagaagcgcaagtggttggaatttttctgaccagcagaaggactttcacaccacaaacctggagtggcctggaggacctgtcaccagtgtgaagggacaggccaggctgccactcacacactccccacatcttgccgcaggaaagcagatcgtttggctggatttgggggattctcccgcacagggcctggtccatcccttcatcagtgagggcttctgcacagctgcaggcatgttatgaacagttttaattcttcagtaggggttgctctccagcagcaaatgctgtctaagcaaaacccccggtaatcagccagcctagtccccattctgcctcatgcatttctgacatgggacttttcctggacagactatccagtgcagccccagttacctacagctgtggcaccctgtctccagccatgacttggcagatactggctagtctgaccatctgtactttcttcagggtcccactccagccactggcccctccttggacagagttttcctgtgaatcacaccttgtacctctttattcaactgcctctgtctcctgccccagcagggaccatggtgccttatagatgcccagcaaacagccccacactgtgttctcttccagctttgcgccaggcagtgggctgggtgcagggaggcagcggtggattggagttgctccctcaagggagcccacagcctgagatgggggagtcagacagataaaccaatggttgcagcacagtgggaggggacggaggtgtactcaggtgctctgggggttggaggaggagcagccagctttggcaggaggccttctgtgaagactttctgcagcaggtgacatttcagtgaggaccaagggagaaggatgtgccaaccagggagagttgggcggggcaggggtgttcatggcatactcgggattgtgtcatttggtgtggctggatttagggtgcatataaaggcagtgaggctggagaagtattctaggtctgcttaggctcactgaggaattggggttcttcctgaagagcatggagcccttggaggacctccacagcaggcagagagacggcagcctcctgggatctgattgcccagccccacttacacaggtggctgaggtgagctcttcccatggagtgcatccttcctgatcagcctgaggagagcagggccccaccatcctgcacctggtgcagaaaaaccctgtgaagctgcactacagaaagacaccaccaggtggcaggcctggagattgcatggaggccccgcccccccaaccaattctttgataatagcacagtgttgaagagagggggccataaaagactgaattcctgttcatgccaggctggctctgcccaacatatatgagactgcaagttctgccactgtgggctgtgtacccacaagccacaggtccctctgaacctgtgaatcaggtcttgggagctattcgagcaggctggattttctcctctgcctcgggggacctgagagtaagttacagacttcatgacccttcaccccaaaacacttgagtatgtatcacctaagaacaagggcattctcctgtagaaccacaatgcaatttgcaagttcaggaaatttaactgatacaatactattatctaataaacagtctatattcagattttaccagttgtccaatcatgtcttttataccttttttctcccagatcacccattgtatttctttgttgtatgtctttagtctcctttaatctagaatcattcttcagcttttctttaactgtctgacatggatgtttttgaaacatacaggcctattgtgaatgtccttcaatttgggtttgtttcatgattagattcaaattatacatttttggaaaaaaaaatagcatgagtagattgggggtggtggctcacgcctgtaatcctagcactttgggaggccaaggtggaaggatcactttagcccaggagttcgagaccagcctatgcaacatagcaagacctcctctctacaaaacattttaaaaattagccaggtatggtaatgtgtgccagtagtctcagctacccaggaggctgaggtgggagaatcacttgggcctggcaggtggaagctgcactccagtctgggtgacagagcaagaccctgtctcgaaaaaaaatatatatatagcatgagtagtacatgtttattaagggcatcatgttaggaggtgtgtgatgccagtttgttctgttattggtgatagtaactttgaccagttggttaagattgcagcttgccttttaaaaaatataggtatatttacacacagtgatttcacatgtcttttaactgtgctgttcaattgttttgaccagtgcacacacccagaagctatgtccttcggcagtaaaagttttacagcacaatatatgtgctctgctctcctcccgcaatcctgctccaagagatcttaagctggaggcaccaggtctgaattccagactcctccccaccacccacacttcacctccaactggagcatgaccacagacccattcagggaggctggcggactcttcatcctggacagtcccttactgtatgtcaagtaggtaattgccagcatgtgtgcgctcctatgtggctgcctgtggggatgcttctcagtgtagagtgggggaccctccatgccttggccaggcttcagctcctttgtagttgggtagacatgaggacagactgagctggggagatcagtggtggcgtttcatctgctcagtgccatctttgtacccctcatccctatggagattggtgtgtctaccaggtggaaccatggggtagagctatccctgccagctttcctggacctggtcacactataccactggactccgggcatcttcagccttggaacccttatgtggctctgatggcttggctttcactgccttgctgggagatctgggctcacgttgcctggtagctttagggtgagatgactttagccccaaattgacagagtaagatcaggtaccccctactcaggccacgcagtgggagctgtcccacaggtgaggccctctcacactgaggcccacagttgctccccaggcttggcaaagcaatggaaccccctgctttcagaatcaggcacagctacagcctgcggacggcggagtgccagctgggctctcttgctctttcctggcctcctcccctcaccctcattgttgcctctctgagcttcctgttgagttcaggttctaaggggactggtgctgacttgtgaggatagaatgtagaagagttggccaggtgtggtggctcatgtctgtaatcccagcactttgggaggccaaggcaggcggattacctaaggtcaggagttcaagaccagcctggccaacatggtgaaaccctgtctctactaaaaatacaaaaaaaaaaaaaaaaaattagctgggtgtggtggtagatgcctgtaatctcaggtacttgggaggctgaagcagaagaatcacttgagcccgggaggcagaggttgcagtgagcagagattgcgccattgcactccagcctgggcaacagagcaagactctgtctcaaaaaaaaaaaaaaaagaagaagaagaatgtagaagagttaacagattcaaagctccggagactgctaagcaaggactgttgagttcctggggcaccgagtagtggaccatgcaccccagcctgaggaccaggtgtctggggggacctgggctcccagtcttcctgagaccagagtagctggggcatcatcacagatctcactgtgaagccgggatccctctgagcaggccctctagaggagtgtttgtggaccacttgcaggcgtgtctctggagggacgcacagccagatgattggaggatggggcagggaaaggggggtctgtccctgggagctgtgtctttgctcaccctactagtaagcctgcagcagcttccggttttctgggcctgcctcttcatgacgcttcctttgcttcagtcaactctgggtagcatgaaggggtggcaggaagggaggcagccttgctccctcttcccccacaagcatctttttcatctccctgcgcgtctgttgccatccttctgtcggcctgtgtcttggagcagttcccacgccatttgcttgagtcgaatcctgagatgggggaggggcgggtcaggctgagcccactgattgtctgtgctgcagctgctccctgcaaactgttgtctagaccatgcctgtgcgtaggcgcgtaggcagcgtctacacagatgttacgcgcctccatggtggtctccagggacctgggaaagaaagaggtggcttactgctcccgggaagacagagaacaggatcagaagggtggtgataccaacttactattggaggcagtgggcagcgcaggacaggcccagggccgccgaccctggcaatgactgtcaccagctggagggaaggtatccgttcactcatggagtatctgctgggcctggcagtgggctgcagtggttttatatatatgtttatacatttgtttttccttgtgaaatttttagttgtggtggaatttttctggtggaggggggcagacattaagcatataaacacaaataaatacatagttacaaaatctggaaagtactatggaggaaaattacagaccaccatgagtgagactaactgggacccactggtcatgaggttatcaaggaagacttctctgaggaagtgatacttagattgagaaggatgcgtaggagttaggcaagcaaagagcaggaacacagtgccagacacattactgcccagcttttaaagatatttctagaagcagttttacccttctctgcttttatgtgaatgacactgaatctgcttccagcatgagcctctttggcagaaggcccagccaagcctaactgtggcttctgctccatctggggactgttggggctcagtgagttacacaatcctagttattctcaaaattaagtcatggctgtgctccccagtggcacagctctgaaaacaaattgggagcctggtagattagacctgcagtgcaatggatcatccctcttactttctggtgcaccacatatagtcagtctcctagggtttagaataagggccaaaacaggccgggcgcggtgctcatgcctgtaatcccaacactttgggaggccgaggcgggcgtatcgcctgaggtcgggagttcgagaccagcctgaccaacatggaagaaccccatctctactaaaaatacaaaattaggtgggtgtggtggcacatgcctgtaatcccagctacttgggaggctgagcaggagaatcacttgaacctgggaggcggaggttgcggtgagccaagatcatgccattgcactccagcctgggcaacaagagcgagactccgtctcaaaaaaaaaaaaaaaaaaaagaataaggaccaaaacaatagcatgtgaggatttcaccttactggtgaagacacacctgtcctcagagtaggagacggcttccaggagtatcagcaaaaacaaactaaaggaaaagacagaaatatttaactacataaaaagtcaaccttatttttaattttaatttaaaaaatgtaaatgttatattaattttattgagatgggtctcgcaacgttgcccaggctggtctcgaactcctgggctcaagcaatcctcccgcctcagcctcccaaagtgctgggattacaggcatgagccaccgcacccagcccttaaccatttctttttatttttttaattaaaaaaaaaagatgaaaaagctatatgtcagttacatccttacatagaaagagtttctaaaaatcagtaacactaatacatagcagtaaaaaatagaaaaagaatataaaggaaattcataaaagaaataatagacacagccagtaagcatatgaaacaaattcaacctcagaaataatgaaagaattacggattttaaaatgctatgctttttgttggccacccaattagccatttataagagtaaggaaataactcagtcctggtgtaagttctggaactcactggactgtaaattggcacagccatcctggaagcagcctggcagcatctgtcaaataccttaaaaacatgtcccccttgtattagcctaatggggattttttttaaatgtgccccacttgactctgcaattctgcttcttggaatttatccagagggagacagataagtatgacaagatgtatatttttgttgttgttgttgttttttcttttgagacggagtcttgctctgtcacccaggctggagtacagtggtgcgatctcagctcactgcaagctccgcctcctgggttcacactattctcctgcctcagcctcccgagtagctgggactacaggtgcccaccaccacacccggctaattttttgtatttttagtagagacagggtttcaccgtgttaaccaggatggtctcgatctcctgacctcgtgatcttccctccttggcctcccaaagtgctgggattacaggtgtgagccaccgcgcttggctgacaagatgtatacttgtatgtgcgtgactattaattctttttttttttttttttgagacagagtctcactctgtcacccaggctggagtgcagtggtgtgatctgggctcactgcaagctccgcctcccaggttcacactattctcctgcctcagccttccaagtagctgggactacaggggcccgccaccatgctcagctaatttttttttttttttgtatttttagtagagacggggtttcacagtgttagccaggatggtctcgctctcctgacctggtgatccgcccgcttcggcctcccaaagtgctggtattacaggcgtgagccactgcgcccggctaattctttttaaatggaaagaacctagatgtccataaatagggaatggtcagagaaatcactgtatatttgtaccaaggagcctgtgtagctatctcaagtgatgttgcaaaagaatattgtgatgcagggatgttaatgggtttttgttttgttttttacagctttattgagatgtatttcacatactatacaatttatccttaatggtttttgtttgttttaagatggagtcttgctgtgtcccctaggctggagtacaatggcgccatctcagctcatgcaacctccgcctccccagttcaagcgattttcctgcctcagcctcccgagacaggcgcccaccatcatgcccagctaattttttttttgagacagagtcttactctgttgcccaggctgaagtgcagtggcgtgatctcagctcactgtagactccgtgtcctgggttcaagcgattctcgtgcctcagccaccaagtaggtgggattacaggtgtgcaccaccaggaccagctaatttctgtatttttagtagagacggggtttcaccatgttggccaggctggccttgaactcctgacttcaggtgatccacccacctcggcctccctaagtgttgggattaaaagcatggagtcaatgcgccagacctcccttaatgtattttaggtgggaaaaaaggaaacataaaatagcattacagtgtggtccacatgtttgtaataataaaactttatataagcatacacacagtcacacacaggaaaaacatgcttgaatgttaacagcagttatatctgggaggtaaggtcatgggtaccttattttcttatttttgcacatgcgtattttctaatgtttctgcagagaacatcagttacttttatatgaagaaaaatacaggaacaggctggagttctgtgtttttgagtccattatggaagggtaaaggctacactcctaaggtgggtgtcaggcctctatcctgggccacctctcaccactccctgcctcgcgttggatgcttcagcaacacaaactacctggcgttggtggcttgcatgccatttcttacctgggcatgtttgctcactgaggccctcctaccatgaaggtccttgccccttgcctggcccactcctgtatccttagggaaattttcccggagccctgcacccacactgggcatcctgtgaccctgaccttccccatgtggaactcgtctgtacacatctgtttccttgtcccccccggatcctgctttgccaaggtgtttgactttggagagctggaagagacaactcctcttttgtgtttttatctgttatttttaaatctgtgtccagaggtgtcttttagcctctggccccaatgtccgcctttcatttttacgcaggaggatctcgggattatcaggcaaatcagagtgctcagtgatcttcagtagtgttctttaactgactcttaaatacacaatgaattttctttttctgaaaagtaattcaggaaaagtttgagtttatgagggaagagaaagtaaaccctgccattgacaactttggggggttctttcatctgagaggaccagagagtcaaggaaagatggggagaggggttctcagggctgtagtcatcaaactccgtgggcataagaagcccccaggcctcgtgtaacaagcatcccattcctggggcccactgtccagatacgggccaggaatgggcacctcgggtcattaggctgtaggtatttggagggcaggtctcactttgggaacagttgctcacctcagggctggggttcagctggatggggctggctctcctctctgtctctgtggtagtctcttggggctctgtttggcattagcatctgcacaaagcccagttttctcctctctgaatttaactggccacttggtggtggtgtgttggctccccgcctctgtaccctgtatatgctgccttaaaggatgtccacctttagcatctaattaatcccaagtaaaggagctgtggttctttgtcacttggagccttggatgctcccctggtagcaggaggagttggaggcagcagcggcagctgtgtgatgcatcccaagtcaaaggcctgcaggctgggttagcataaggaaactcgctgacttactcagtgagaaggggtctttctgtcttgtctagagctgagaatgaagcggagagcatcagacagaggagctggggaaacgtcggccagggccaaggctctaggaagtgggatttctggaaataatgcaaagagagctggaccattcatccttggtaagcctctgacctttgggaaaaatgggtgggctgggaggcaggggcagggcacattggctcgcatgatctgacctacagacatcagagtgaggtggcccacccacagcagtgtgtggtcctgccctgccccaggcttggtccctagcttcactacttgaaacagaatatgtttatatcagtggaagacccaagccttgggtcactctgtaccaggggctgtcagtgttttagccataccagccttagatcagccttagccaatagctaggctccgactctccccccagagaatcctatgtgtgcccctagaatggtgacgtgctcacaggaagcacacccattagaagtcattagctgcattagaacccaagctctggccaggtgcaatagctcacttatgtaatcccagcacttttcgaggctgaggtgagaggatcacttgtggctaagagttcaagactttgcaagcttgggcaacatagtgagatcccatctctactagaaaaatataaaaattaattgggtgtggtgtcacatgcctgtagtcctagctacttgggaggctgaggcaggaggattacttgagcccaggagtttgaggttacagtgagtcgtgatcacgccactgcattccagcctaggcaacggtgcgagactctctctctaaaaaaataaaataaaataaaataaaataaaataaaataaaatgaaaacccaagatctatcatccaaggcactgctttatgccattcttggatggcataatttcacaaagcattttgtatagccccccaaatttatttaaattggcacagaaatcctggcacaggtgttggcagttggccagaggagcagcaaagcatttctgcatgatgcataaggaccagcagtccaaattgcttatagtcagggttgcagccagagactgggcgtgagttttactttgggacagcattttggacttacaggctcaggatagttccagctccagtcattcagtacatacttaatggtgtgtacctactacgtgccaggcctgtgctgtttgccaggcctgtgctgtttgccaggcatgcagcagtgaataagacaagttcctgccctcacagagaaacagagtaaacaactcaccagtcatcaccggtggtgcaagtgccttgaaggaagttccacgatgacgtgagatgagaagggcccgtaggtagggcaggcaagaaaggcctgtttatgaggaaacaccatatgagctgacacctgaggaggagaagcagcaactgtggggaaagctggggaagaacattgcagacagaagaaacagcactgcagaggcccagcagcaggaaagggcttaccatgttgggaactaggagcccaacattaggagctggagtgtggcatgggacagggaatggaacatcctgttagaaaggtgggcgggaactgaatcatgcaaggccttgggggccagacaaaggagtttgggtggtatgttaagagcagtgggtctgtgaacattgcactggtaaaaaggaaaaccaagagcagcggagcttcgttaagagtttttcacgcagcagtggcactgtgacatcagatttccactctcaaagcttgggcaaggtgctgtcacgggacagtgagcactgtgcatctccagaagtacagaaagtccccaaagctggcacttggacaggggccagatggctgtatcagaatctccagggaacctgttgcggctctagtttcctggatcctcaccctgaagttgctcttcaggggatccaggatctcttgggttttgttgatttttttgaggcagggctttgttctgttgccctggctggagtgcagtggcacaaacacagttcactgcagcctcagcctcctgggctcaaacgatcctcccacctcagccttccaagtagctgggtctacaggtatgctccaccatgctcagccaatattttattttttgtagagaagaagtctcactgtgttgcccaggctggtctcaaactcctgggctcaagcagtcctcccacctcagcctcccaaagtgttgggattacaggtgtgagccaccacacccagcctggatctcttgtttttaatagatgctcactagacattccagcgtgcacccagggttgaaaacctctctttgggaaatgtgtttgcaaaagctggatgtgctccaggcagagcacacatacccctctatttttggaggggagaccttgaaaactctccaccaggagaccttggagggtcagtccagtacacatgagctatggtgccctcctgaatagaaggtctagtaaaagaccacgtggtgacctggcgtcgtgacagccagggcttctgaaaagtagaccagcagctctctgtgccgtaggtccccgtctgggcaactcaccggtgccaagcatagtgcagtgtttggcgaggaaagatggcacggatgacttctatcagctgaaggtaagtgagacatgggggtgagggtgcctcaggaacagggcctgtcatgccaacccactcctccctcctccaccttcacacctgcgtcattgtgaacaagagtagcgccatttcttcccgagaagcaatcaagttcacagtctccctcagaacaacttctgatttaaagagttttgtctgtgcataaattacatcaccatcatattaagaaaaacgatttcacttggtgtgtttgtgtgtgcattgtgcacaaatgtcatgtggtaaaaagccccctgcttcccccgttctggttgttctgctgtgtaaagtgaggtgttctggttttggttttatttttatgctttcctaaagatcctgaccctggaggagaggggggaccaaggcatagagagccaggaagagcggcagggcaagatgctgctgcacaccgagtactcactgctgtctctcctgcacacgcaggatggcgtggtgcaccaccacggcctcttccaggtgagcggccttccccctcacccttcgcgctcacctctggctggctctgtgggctgccacttgctggggccacagccatacgagcagctcacgtgacccttgggtgtccctgccatgctaggtacatcaggacttccagggtgggtgagatgggctgggctggaagtcaggctgggccacactagctgtgctcctgtggggatggttatagcctagccaggaatgcacacagtttgcatcttaacagcagccaggctttctttgaagagccacttttccgagaaaagaggaaagcaagaagtcacttaaagacacccgggcccaggccaggcacggtggctcacaactgtaatcccagcaacgtgggaagccgaggtgggcagatcacaaggtcaggagatcgagaccatcctggccaacaaggtgaaaccccgtctccactaaaaatacaaaaattagctgggcatggcggcgcacacctgtagtcccagctactcgggaggctgaggcaggagaatcgcttgagcccgggaggtggaggttgcagtgagccaagattgtgccactgaactccagcctgggtgacagagcgagactccatctcaaaagggcccccttgtccttttttttaaaatttttttttttgagacatttactggacaaactgaaatgcctgagcaggcagaagaacaggtggtcagatcccttaggaaaggtattgattaacagtgtgtacctgacaagaaccattcttggggcagcactgaagttgtatctccagaaatgaagagttgggttcagaatgactgggaggcctccttcacaggcttgggaacagccccattcctcagctgagcatccactgagccctcagccgtttgctggccaggaccagctcttgctaagacagacctgctgtttgagaggcacacagtgccagagagagcagtcacattttgatgctgacagtcctggattcagctagtatgaccttgggcaagtcacttaaggtctctaggcctcagattccccatctataaaatggggatagtgataacagtacctacctccattggtggttgggacgatgaatgagattgtgtcaagcactgagctgctgctggaacactgtcatcatcattgctgttcaggcataaaaactccttgtcagcttgagttcctaaaataaaacaaagggaaaacacttcccatccccatgtatacaccccagcaaggtctttgttcttagatttgcaattagaggtgactcagagtatttttaggcaactccaaaaattagagtatccccataaacatgaaatcaaattgagggtgattgtggtttcttggtattttgtctgtgatatcttcagaagcttggccttagttcatgtcattttggatgagagaacctgggtgatcagaagtgtttctagtgtactgtttgtgtgccagacactgtgctaggaaaagcaaatatgaggtgtggtcctgctcttaagaagaaatgtggaggccgggcgaggtagcttatgcctgtaaacccagcactttgggaggctaaggcgggcggatcatgaggtcaggagattgagaccatactggctaacacggtgaaaccccatctctactaaaagtacaaaaaattagccgggcatggtggtgggcacctgtattcccagctactcgggaggctgaggcaggagaatggcatgaacctgggaggcagagcttgcagtgagccgagagcgtgacactgcactccagcctgggcaacagagtgagactccgtctcacaaaaaaaaaaaaaaaaaaaaaaagaaaaagaagaaatgtggatattcagtccttcaggagttccccagaggggacagtcagtctaccccgcatgacaccaaggacttcctcaagctggtcagatgaagtccccctgttttttgtcttactcgaaatacctttcagcaaggaaaatgggtctagagtttgctaccattgtgtccatctcgcagccacaacattggtggcagtacccacttactgagccctggcagtgcatgacctaagcacaggacatggattgtcttatttacttctcttgggctgtgggggaaagattactagctcccttttaccgatgaggaactagagacctggagagggtaagcagactgccccaggtcccacagctaagacaaggtggctggggcctgaacccagcagtctgaggtcagagtcactcttagccatcatgtgactgtcgggagtactgcatcccgacagtcctcttttctgagaaaagaggaaagcaggaaggcacttgaggaaaacaggtgtcctggatacacagaacctgtatggcctctggagcctgccaagattgacctctttctaacttccgccatcttagatatcaaaagggggttctgttggtgattactggaatctgggtgccatggattcccatttttgctgcttgagcactgggctaagagggcccttgggctctaaatgcccagacctgatctgaatcctttgcattatgatcaaagcattaagccttcacctgagatgttttagcttcagcctcttgctggtcctggcatttggcacacaagaggctgcacagtgctgacctgccccatggtctaggctgcccaggcctcagtcctctctggcccgcacatgcaggctaattccaggctccctcactggtttgagtgtcccactccagaggagagtcccaggccctggccttggccctgccaagttcacagccaagccctgcgctacccccttgcctcccaggaccgcacctgtgaaatcgttgaggacacagaatccagccggatggttaagaagatgaagaagcgcatctgcctcgtcctggactgcctctgtgctcatgacttcagcgataagaccgctgacctcatcaacctgcagcactacgtcatcaaggagaagaggctcagcgagagggagactgtggtaatcttctacgacgtggtccgcgtggtggaggccctgcaccaggtgaggccacaccctgctgctgcgccttctggccacagaaagccacctttcttgctgctgctgagcagaaggcagctctgtcctgtgcacccaggtgtgctttgcagctgggagtgtccaaaagaagagtgactgaatggcaggtgcacagggtgaggcacagtgccaccctgcaggccaccttcctggtgagggctgacctgcagcccagctgtggtaattaccacagccaactgtgttaattccccatcagttaagaggcctggtgtccacccccatgtagtgatgacagtgagatacccacccaagcaactacagcacatctgagctttttgtaggattagaggtgtcaggcacgctgggacaaaggataggagagcctgagcctcttcccggtgtgccgcttctgtgggccgagcctgtggtacttagtcacaaagccatgacagctcctccccgacccccagatccatcctgtccatggaatgtctaatggaggggaaaaaatgagtgactttcgccaccagccactgccctgaggggagaaagagctaaagaagctgccacagatggggagacactgactaggtgcacattcattccccatccagacgcgcaggtcacgcgaacttagaactgtcctgatctgcctgtgcttggagcctaaagagacacatcatagaatttttcctgccttctcgaacacctggagagcccccatcttacagggtgggccctgaccccacctctcacattgacaatgtaaaccatacgcctgttgttttacagaaaaatatcgtgcacagagacctgaagctggggaacatggtgctcaacaagaggtaagatccctgtctctacatccatacagttaccccggggctggggcaggctacacattgcaactctccagtgccctgaagtgtcctcatgaggattccgactcaaaacaacccacttcctccaggaatcccagggctcgggatgggatgaacatgggaattgggggcttgctgagactgggagttttgagccacagaaagggagctctgggaagaactttagatctcccttgtccatttatttgtcacacctggctcctagtgggtactcataaaattactataaaaatggactaaatggtcaggtgcggtggctcccgcctgtaatcccagcactttgggaggctgaggcgggaggatcacttgagcccaggagtttgagaccagcctgggcaacataatgaagaccccatctctacaaaaatatatatattttttgaatggacaaatggggtgaaggaacgagcaaaatgatgccttgccataggtcaatttcctcaggaaacagactctgaggtttacgtgcagaaggtttactgtgaagtgctctcagggtgagggggtggaattaggcagagggagaagctgaaccgcagtgaagtcccagcagggcctcagcctgaaaaactcgagagtgggatggcctgcagatggcccgcgcttggcctttgtgcccccacagcaatcagtcactgaatgtctgctgtccttagggaggggcattctcttaggcaaggcagcttcttttggctaagagggcctcctggagagggatgcagctgtgagtggttacctgtaaaatgccaccagctctctcagcagcaaggagagcatgccttagacttggaggggatctggcggcccacccttgttggggtgaaccagcagcagagggacaccaagcacggccctggtttcaggttgtcatcccgcctcgacagagggtcctgggcctctttggagtgatctgggacagtgctaccactgtctcaccatgttagagggaccaccaaccatgtaggaacccaggaccagcaggaagtgggcccactctgtgggctaccatgatccttgaaatgcagggctgagaagggcacatctcccccactccgcccccacccattatttctgagctcccctctgtcacctctcaactcggcattgagcaggttgaagggcttacaaaggcagcctgaatctcacagcagaagtgttgtggtgggtgattcattccatgatgtggccagcccagcccaggaagggcccgaggcccactgtcctctaaagaggccaaagccacagtggtcagaggaaaagaagctgcctggaggttggcctccggggagggggcattgccttgtgccccatctcaactgatggggaattactgctgggggttccagatcccatagctccagcctgagaggccatcgggacgatgctgtgcacctcagctgctaagcattctccatccttcgactagcaccacctggtgctggggctgcagacagaaacgctcagtggttcccactaccctctggagcccaccatctgatggtgtactgaccagaagatggtatcatgtgtggaggactggcgtgcagagggcaagggacatgtggagggacagtggctgccacctgagtcaattcgtgaaggatgagttgggatttgccaggctgagaaagtgaagggatgagaaccttgccctgctatgctctgcagggggaagggagggaaacaggaaattccagagctgcttgaaccctggactggctgagtgagtgagttgaggaggacggaagcagcactgacatgggggtcagacctggctcacttcccagtgccacttcttcgttatcttggagaccgtgagagtgtggtcctctgggtacttactgattgaattcatatattgaggtaccaagcacttctctgagcttccatttcctcatctgtgaaagtgaaggtcatcctggcttcctgggaagattggcctgagatgcaaatcagtgggtgtgaggctgcgtaatatgatggggtttggcgcatcacgggcacaccccagtgctaatgtagccaggactggagagcctgtcgctgagagacaggagaacaggacccatgggctcacatctctggagatgaggcctgctgcatgttgagtggccaacgaggacacccctggtgagggcccagcggtcccccagccatagctctgcatcatgagaggaggtggtggggagccccgagcaaaccagccctgggctgtggagagccagttgtcataaagttgggaaattgggtcctgccccttcccctggccctctctggggccttgggccagtcccatcctgctgtggactacaggcttactgttcacaaagagagagcatattttttgggcacctaaatccatctggctgcagagcccatgtgccctccagctggactagagagctcccagaccttccacagcagccattcattggctgtaaatgaacatcccagggttgtcatgggaacttgccgggctcatgcctgctaaccacaccagcactcctggccctttgtgtcactgggggatttgcttccaactctcacttccccagggccccttggtcctgggagtgtagtcgaggggtcgcacctccctgcatacgccggcgtggctgtagcagctctgctgtgagtgtgagtgcgtgctcctcagggtgcagaatgccaatgcctcactcatacccagtgtcctggttgtacttcctgaatctgataaatccccctttttgtgtctcagggcagacagaggttctggctgccttttacttgagtcatgggcgctccagagtggcagggtagtgtggtgcagagagactcactgctccgtgtgtgtcctctggcacaccctccgctctggggccccactctcacctcgttcagttgacctgaaggagctccagcccactccagccccttcccacccatcatgccaggctataactccactggagcagtaggcggaccagctggaggccttctcagcagagcagagagctctcaaggagcagacagggggaggtgttggcaaggcagctgcaacaacaagttcaccccgctttggattttaaaaggatcgaaattcgaaatcctcttctggggttatgtgaggtgctgtggggtctttttccttcctcctttctttttggtaggcaagcaacataccaagttcctagaaaaggagaaaaacactgtggcagcccagagggccatagctaaagcgtgactcactcagagccgatcctactgacacacgtcccctccctccgtcccactctgccattgccccctcctgtcaggaccagactagggggtctgggactcccggggagccatgcaccccccacttgggtggtggtggcagggcaggggagtgttgccaaacctcaggaggacttggagctgcccgtgccacttcctgtggagagactccagtgcgcctgccgctcagccctgcagagcctcagctgtgcctgcccgtgccctggcagagggtgggaaagtcccaccagcagtgttgagttgaaagctcagccacactggcatgtgctctccggggcctgttgtcacaccatggcacctctcccctaccgcctccaagacagagtcttttcctaccaggtgtgccaaccatcggagatgagaggacaccagcttctactatttgccaggcattgggctaagtgccctccatgagattatcttatcttgctgaatcctaacccagttctggagtttggtgctgggatttcactgttgtacgcatgaggaaattgaggtttagcaagagattcacagagcaaggaagtggcagagccaggactaggaacctggctcccaaacccaccgtactttctcctgagctgtcctcctctcagcgtcttgagcctcagagacccacaggatgcatttgcagcttccgcggccatctctgaccaggggagaaaacccacagtgcctctgctctgtgggaaccttctggacaagaggcccgagcagccccatattcagggcagcggcactggagcttcagagctagagcagcccactccttgacgtgcaagtgaccctttgcagtgacccttcacctgtgcgatcaggctctagccgcctgcgggccaccagtcagactcctatggcagctgacagggcggacctgtataggcgctggagttggcgtttccgtggggaatccagaggacgggctggcctttgttttgcatcgagccctttgccagcagaattccccgagatcaccgagggctctcagagccgcctggatgcggctcccggggaaatccgccagcagccacacatgccctctgcctctgagagctgattgtagggagaggcagcccaaggcccccatggagctctccttcctgttgtcctcccagcttctccccctagcttctccacccagccagccgacacaggagcagggcagttgggtagagaggcatccttcctcactgcctgccccagtgggccaggaaacctttcccaggcctcttagacagggcctgcccaccctcccagcccccagtgtggtgtaaggtgtaagggtcctctcggggcacttccttttgtccacatgtgagttttctccaaaggatcagagcccaaagctgccctgccccacgcctttcagagggagggtctgtgatgttctagccagggcagagtcacaagtacgaggtaagggatgagtcagctttgatggaacagaaggaaaagtcattcggggcctggggccctgcccagggacacatctgggcatgaggcagctgtcagttgtgtgtgcagctctggggccctgcagacctggtcttggatcctgctcttctgctcaccagctgcatgaccttggccaagtcctttcacttccctgtgcctttgttgtatcatctgaaacaggaccgtgagaaaatccccctcattggccactgtcagtttcttcctctgcagtggttgtggggccaagtgagaactgacatattccgtggttcggaggtggctcggggccagcccttgggtcaccttccaaggtggagtcactcacctctgctggacttccttttcctcatgtgtgaatgaggaaattgaactaaatctcaggtcactcccagtctagaatattacgtgaggctgtttttgagaaatctctgaaagttgttctaagccctaagctgtaccccgagattcagcccgggcagcaggtccagggatggcctgtgcaacactcagatacctgggagagaagccgatccctgctgggacagctcggctggtggccagaaaagtctggggcctgattcctctgctctgctccctggagagggggtcggggcagctgcttcaccctctgacgagaagcctacctcctactgttcaggattgggtgttggcccagtgaggtgtgtcctgcctgcgtgtcttgtgcctgttgctatagacactgaggtttgttcactctgtctcccactcctaggacacatcggataaccatcaccaacttctgcctcgggaagcatctggtgagcgagggggacctgctgaaggaccagagagggagccctgcctacatcagtcccgacgtgctcagcggtacgtgtgtgtgccagacattgggcctctaagctcaatacagccaggctctgtgacagtccactcagcaaatttgtgggcaggccctgggcaaggtgctggggcttcactgggggcccagaccagtactgtccctccccatacaaaatgtttggtctgttggaggtggaagacgtaatgataacatgaatgcatgtttaattcctctgaggttagtgctagggaggaacgggattgctgtgagagtggatgaagggtgcttggaggactttccccacaaggtgtgacagttgagctatgatcttaagggaaactaggaattccctgggtatgtgtgactaggctgaggctgagggtcccagaggcagcacagcacgttggagcaattgcaggctgctcagaaagtgagcctggttcaaggggaagccagagaggtgcgcaggggccagatcaggcaaggcctgacataggcctcagtaagagatgtcatcctttacttcaagtgcgagtggaagccattgaacagttcttaactgagtgtgctgctgtgagtttgtgtttcagagccctctctccttgtctgtgttcattcattctgttactgtttgctgagggccacccaggcccaaagctctgttctagacactttggagacaacagggaacaaagtagacaaacattgctgccttcatggagctgactttctagtggggatgagacagataatacacgaaacaaataagtaactcacaggccgggtgcagtggctcatgcctgtaatcccaacactttgggaggctgtggcgggatcataaggtcaggagttcgagaccagcctggccaatatggtgaaaccctgtctctactaaaaatacagaaattagccgggcgtggtggcggttgcctgtaatccaagctactcaggaggctaaggcaggagaatcgcttgaacccaggaggtggaggttgcagtgagccgagattgtgccactgcactccagcctgggcaacagagcgagactccatctcaaaaaaaaaaaaagaaaaaaaaaaactcataaagttactgcccactgatctgatttccaagttccagacactgtgctgagcgtgactcgcgttatctgtttaaaccacacagctaccctgtgaggccaatatctatcttaagtccttttttcacagatgaggaaattgaggctcagagagatgacatctcttgtccaaagtcgtagctaataaatagtaaactggaaaatggaggcgcagccccagggctgcctcccactaaagcccattctcgcaactctttcactgtcgactctgttgctttctctttcccccttgtccttggcccaaatcctttagggaaccggggcttacaccagctcccatccctccaacatggagaacttggggttgtctccaagatccttcatccccaccccacacatgagtgcgccctttccgtgcagtggccgagccagcctcgtcccagctcttcacacacatcctggtgagcaggctgctgtaatacaagcacttacaactccctcggaggctcccccagctgccgcttctgctggagagccaggcctgtccccagggctgcccgtgtgcaaagacagtagcaccattccccagacctgggggttttggttagagtcactacagcctctgctagagggaactgggtgccaggggtataccctaactcctggggcaccacccccatggcccagcacagtctggcaccctctacagtaatccccaaagcatccccataggagatagagccaggctcctccttccacccagcctgtgagtggggctgtgcctgtttgcagggctcaggctgtgggctagccctggatgggactcctctcttgcagcaccagcctagagtggccttcatttgcagtctgaggctctgtggccctccctgctgttgccagcagcctatccttctggttcttccagactcgtgccagtcttggaggatgaaacaaaggaatctgactgaatcagagagaatcctcgactgggagaccagagacctgggttctcattctggccttgctgttgaaccagctgtgtgatcacggcctccaatctccttctgacttcagcctcctccctcctgggttagaagctgaagtaccagccctaccatgtgggtttccgacccaggtctgccctttcatttattctccatgtgcccagcatgggcatggggcatggagctgtgaaaaggcaggcctggtctggccctcatggaggtgatagtctggctaataaccatgtgaatttgggggaagttacagacctctctgagcctccattttctcatctgtaaaatagggatggcagtagtagtacttgagggattaaataatgcccttaaccagccaggcgcggtggctcatgcctgtaatcccaacattttgggaggccgaggcgggcaaatcacgaggtcaggagatcgagaccatcctcgttaactcagtgaaaccctgtttctactaaaaataaaaaaaattagccgggcgtggtggcgggtgcctatagtcccagctactcgggaggctgaggcaggagaatggcgtgaacctgggaggcggagcttgcagtgagccgagatctcaccactgcactccagcctgggcaacagagcaagactctgtctcaggaaaaaaaaaaaaaaaaaatatatatatatatatatatatatgtaatgcccttaacctagtgtttggcatgatcgttgctgaaagggaagcttgtgggtacagtgtcccctcagaagccaaagcccagggaaggtcgcctgcccaggtcaggctcccagcgagtttgtctggggaggggccattcatacctccaggtcaggacagaggctcgggctgagggaaccctacacaggtcctggaagcagatccttcctgcctaagccagcaggacagctcaacaggaagcatcttccagccacgggaggagaggcagcaccttttttggaaccatacagagctaagaatggtggtacaagtaatagattctgtactggcaaccccacttggtggagcaagttctaggaaaagggggctgtccttgagtcagccatggggtcagccacacagtcaccgcagctgctctttggcaccgggcgctggaaagagcctaggatgacacagcctggaaagagcttgggagaagctcatcttccacagaactacctgctataccagccagggcaggtgcttattccccacaacagccctctgttgtaggcggcagtgccatcctgaaggtgccgtggtaccttctgaagacgcaggctgaggcctgtaatggcactgccatgcacacatggcacaccctctcccggttaaactgcttgcccttcactgggccctggttgcccagggaggtgacgctagggtgcctggcagcgtctcttccacacccacggagaacggagttgtgttctggggtccaggctgccacagcctgctggtataccagagggtgcatcgcagggagtgggcagggccaagagctttcaaatgctccagtggtcttcatattttgcatttgggggagtgggtcagacaatggctgtattgctgctgggtgggtggacaggttgccctgaaaggaggcaagcagcagagcctgacagtcagatgtgggcccactgagcagccatgtggccctggacagagcagatcactgggcctcagtgtcctcaagctgtggagcacagttagtgaaataaaagtgtttcttcccatgctgtcctaaagcgggtgctccgttagatgcctgctccttttcgctttacagatgaggaaactctcacagagaggtgaattaagtggccatccttcatttagcaaatacttgggtccgtgctgggcactggggctcagcagtgaacaccgcagggaggcacctgcacctgagaacttcccttctagaggggagacggggagtcacaagtagacaaaggaggggacctgcaagtagtcatccgggctgtgaaggaggcaggtggggtgtggggacggtgacaggaggagcggccagctcatctggagccagctagttatctgctgtgccagtgttcttgaccccctgcttgtgagctgctgtgctgggtgctggggctgcagacccatgcctggctcccaggggctcgccatctggccgggcggggcaggtgctgtgagcaggtgctgagtgagccctctccttggggcaggagaggtgcatcctgaggaacaggggagcggggagcacgggcaggagctcagaggacgactctggggggactggaagtgagggtggcaggtggagggtcccaggtgggattccaggctggtgagccacggtggtgctgtggcctgaagacagtgtggtatgtgtgtgcccgtaggccggccgtaccgtggcaagcccagtgacatgtgggccctgggcgtggtgctcttcaccatgctgtatggccagttccccttctacgacagcatcccgcaggagctcttccgcaagatcaaggctgccgagtataccattcctgagtgagtcctgcctcccggggggtggggggggcagccagcctgatgggcttaaggcagggaaacggcacagtgagcctgggcatcctggccacagacccagcaccacccactgagccctcctccccaactccctgcctcagggatggacgggtttctgagaacaccgtgtgtctcatccggaagctgctggtccttgacccccagcagcgcctggccgccgccgacgtcctggaggccctcagtgccatcattgcatcatggtaagtggacaggcacttgaccgggcacaaggctgcgtcctcagggcctctgcccatcctacccagaaaagcagccagtagtcagcctgcttctctgccagttagagtcagatttccagattctctgcatggacaagattgggagggcataggcagaactgaaggttgagcaactatgggctgccatagttacccaggccctgccagcggggcatgggcattgcctcactgagttctcaccaccacctgtaagggagaaattgtccccctttatgggataagaaaactgaggctcagagaagcagtctctcatggcaggaacacaacccaggtgtgtctgactccagttaagtctgggatcaatggacctggtctctctggggccagcctgacctgtctgcctccctgcaggcagtccctgtcatctctgagtgggcctttgcaagtggttcctgacattgatgaccaaatgagcaatgcggatagctcccaggaggtgagttggggagggcagatgggccattacccagccccaagggacaggcttctgggggcaggcagggcaagggcagaggtggcagctacccgcaggccacagagtttccttggtcttcttccccagccttggggtgggaaagggagacttcagtcctcagcctgagctgcctggggcctgccttgggcttggtgtagctggagatctttggccagagagacctgtgagacagccgagctggagccagtgcccaagtggcccaggccagccctctcagcttcctcctgctgcccaagtcacatttctctgccccctgactcagagttctctctcacccttcctgcttttcatttttcagatgattcatttctccctatttctttcctccccattccctgcactggagaaagtgttgggcctagggtgggggcagagacttgggcaccaggcagcagagggcaggtgatcttagggtgccccctggagggcagggcttggccgagcaacagcattgctgggccctggatattggaaggaccttccctccctggcccaccttggagctccacagtgagcagtgtgcaggtaggaccaggaggggccgtgcctgggagagcctcccagagcctcctggcccccgaggaaagagagttccaatccctacccacctccagcttccaccctttagctgtttggctaaaatcatcatcactagcccgcagtgagtgcctaccccgagggcacctcattcagccctcactgcgggcctgcgtggcctgtgttcttagccccatgttacagaagaggaaacagggttagagaggactttcccaaagccacacagcttagaagtagtggagctaagccttgaacccaagtctcatccggaagccctgctgtctcctgtggtgactggcacggggacaccacttcagcttctgttaccatctgcctagaccatcccagggagctcagcatggggccctgcgtatgtggctcctccaggtgctgcgcccccagcccagggcttgctcgtacctcttgacgtgcattagccgcctcagggctcagagaacctttgcgaggggccagacagctaaggcttctgaggtaaagtgacctctcacgcagccagtgagttaggaagcatgagtctgcgtcagtcccgggtccgcagggcggcctgcaaggggagttgaggttggctggagggggtcagggacccaccctcagcgccactcccacccccggccttgaggcctgagggtgtggtgcctggaagggtgactgcaggagccaggctgccagcactcttgcctgccctcctgtctgctgcgctgccttcatctgggtttatctttgtctccttcccaccctccccgcctcaaaggcgaaggtgacggaggagtgctcccagtacgagtttgagaactacatgcgtcagcagctgctgctggccgaggagaagagctccatccatgacgcccggagctgggtacccaagcggcagttcggcagcgcaccaccggtgcgacggctgggccacgacgcacagcccatgacctccttggacacggccatcctggcgcagcgctacctgcggaaataacagcctcagccggggccaccagcactgctgccacttcttccagccccagccaaaggcgtggctgtcagggctgggccctgtagtgctggactctcccgggccacaatagggacagggcagggacagggacagcccaggtcacacgtggggtcagcagaggtaccacgaagctaccttttgggatgattgctcgattgtttggtttttaaatctgagaagcctagataactaatctgcttttaatcacgatgttttaatctacctctgtctctttaaccatgctgtctctggactgagcaagagggaggagggagcctgctcaccccactccagggccttccccagcggccaccaactgacctggggcgctgctccccacagtccaaataagctgaaagtgcagctcgctgcaggccccagagcgagcttcccctcctccctgctctcccaggcccctgccacagcctctttccgtccctctctttctgatccaggcccctcagtccaagctttggaaaaccttcacctcatcttaaaccgaactcaaatatatttatttttttaccataccaacttctctcccatctctaggtggctcagtccatggccactccctgcccccagcctggctggacagcaaggaatccacagcccacacgtgagctccctcctcacccccaggcagggaagcccctcctgccagtccctgtcccctttcagcccaccagtccctctctgctgccggtgatgggaggcctttctagacctggctctttctctcccgtctcagtggcttctctgaggtgctgtacacgcgcgttaacctgttcccttctctatccttccccgtggtactgagctcacgtggactcccagtgcgaaggggcccatgggttgggctgcaggcctggccgtgagcgggggctgcctgcacgctcccctagcctactcttgtgtttaggggatggtgggaacatatcccagtgcccttgcctcataatagatgtggtgactctcccggtagaccctagcaagggtcctccatggtggtgagggactcaggagaattgtagggattgggggaccctgcctgcctggcttgagaacagccctgctgcccttttgagccgagattttgaagtggatgcccgtcttgccagaaatgctgttctcaccagaatgccccctccccttgcccttactggacttggccctgcctgatgccaagcaaagacccttccccagaggcctaccccccatatgtcctcagagaggctgagtgtcccctccaggcagtcatgggccctgaggcccctcctgcctggccctgctccccagtggggaggtgactgtgtttcccagagtgtgagccgctctcctccccctaaaaagctgactcactgtgagtgaccttgggcaagttcccaaacctccttgtgcctcagtttccccatctggaaaaaatggggccacctcttgccagcagtagcagggctgcccacgcccctttctccccatgccccatccagcacttgggcgactcatgcctctgcctcagtgggcctgtgggagcctactggagcccagcacttactccccctgagcagcgagcctgcgtctgtctcagctgtccagcgctgagggccagggtcttgtgctgtggggctgggggatgccctcttttctatatttatttcatagaaagtctcctgcgggagcggaaatgcagtccggcctagggctcccagcccttgactgtcctcctgtgagggcctgaagctgggccagggcccgtcgcagcggagccccctctcagcagcccaccgggtccctccaggctgctgcccgtgcgtggtctttctcctccttttcaaagcaatagccgccgggtctgcaaagccctgtcagacagactgggcccttccaaggtcaagccatgtgtctgatgacattcctggtgaagcaaaggagaggaggatgggtcagccctcactgggtgtcacacactgagagaagtcctattgtaaagaaacggaaaaagtcacaaaaaagtttgtataaagacatatttttgtactacatggggactcttcctgcatgtcagcaataaaacttcctgatctggaaccac

SEQ ID NO: 8 - protein, 435 aa, Homo sapiens
MKRRASDRGAGETSARAKALGSGISGNNAKRAGPFILGPRLGNSPVPSIVQCLARKDGTDDFYQLKILTLEERGDQGIESQEERQGKMLLHTEYSLLSLLHTQDGVVHHHGLFQDRTCEIVEDTESSRMVKKMKKRICLVLDCLCAHDFSDKTADLINLQHYVIKEKRLSERETVVIFYDVVRVVEALHQKNIVHRDLKLGNMVLNKRTHRITITNFCLGKHLVSEGDLLKDQRGSPAYISPDVLSGRPYRGKPSDMWALGVVLFTMLYGQFPFYDSIPQELFRKIKAAEYTIPEDGRVSENTVCLIRKLLVLDPQQRLAAADVLEALSAIIASWQSLSSLSGPLQVVPDIDDQMSNADSSQEAKVTEECSQYEFENYMRQQLLLAEEKSSIHDARSWVPKRQFGSAPPVRRLGHDAQPMTSLDTAILAQRYLRK

SEQ ID NO: 9 - DNA, 128963 bp, Homo sapiens
  CDS (158)..(209)
  CDS (64940)..(65024)
  CDS (73797)..(73875)
  CDS (87703)..(87837)
  CDS (89608)..(89766)
  CDS (92728)..(92844)
  CDS (102998)..(103131)
  CDS (105547)..(105595)
  CDS (106052)..(106175)
  CDS (109623)..(109740)
  CDS (110920)..(110995)
  CDS (121519)..(121578)
  CDS (123612)..(123648)
  CDS (124688)..(124833)
agagacgcggcaagggggcggggccaaaggccctaagctcggcgttccagagagtggggagggggcaagtgtcagtcaggacgggagtccggcgggttacagcggaggcctaggtggcagacagggggcccgggccgctgcgtgttgtccacccaagatggagttcctcctggggaacccgttcagcacaccagtggggcagtgcctcggtaaggccgcgtgtggggcaggaggctgggcaacggcggccgctgatccggctggtgaggaccgcgggcctccgccgggcgccggtgccacttcacgagcgggctgggcctccgccagccgcgggtgccactccacgagcgggctgggcatcctggtcgtcgggcctttgccgggcgcttgtgccacctcacgggcgggctgggcatcctggtcgtctggccttcactgggcgtcggtgccacctcacgggcgggttgggcatcctggtcgtcgggcgttcgccgggcgccggtgccacctcccgggggggctgggccttcgccgggtgccggtgctatcccacgggcaggcagggcatctgtgtcctcgggcctcctcccgggcactggtgccacctcacgggcgcgccagtgccactctgccaggaggcacccctgaggcccaacttggactcggagatgccccaggcttccctgcccatcaaggctcagcccttccttttgctgctagaggtggtgccaactgctggtctgcttccccaatgcgctttgggagatgccactgcatgtgtctttatccagcccagcaggctcactgccactgccccaaggacccagttctcccaaaccctttgtgggatgtcaccttcttctccatctttgtccctcctcttcggtaccagcaaccctcagactgggcaccctcccagaaatgccccctgctccgggacttgctaatttgagctgcaactcagctgtgctgtaggagggactgggataggaggaggggctcttggagggtgattatcttggcagggggatggcatgcctgcagtgcctcccaggaaagaagggaggctgtgttatttaatgataagagccctggactgggaatcatggaagcctggactctagcagtggttttgtcagtgactccatatgaccttgtgccctttctggtttgaagttcccctgtctgtcaaagtgtttggagatgagatgtgatagatcccttaaagttctcaagttttgatattctttgtagtactctgcacattgactgttgcttcctcccccacctcatattaagtttaccaaagctgaaatcttttgttggcaatgtagagagaatggtactcagcattatctgttaatcctataggggggatgtggacacctggggacaccagagatggccagaatcatggataaggaaagcccaaagtgtaggtaaaggaatactgaaatggccaccatatgggacttccttactaagaaagcaacttgcctttttacccaaggcagtggcttatgccacttgatcagtcaagaatgctgattagtttgtttgaaaactggattcctcctggttggttgaaggactggtaaaacgtcttttatgagccaggatctttggtgttcttatgggcctgatttcagcagtagtgatttgtttattttctgctttgcttatgaaattttagcttactttccagcctttagtggagcctataaacttattgaggtctctcctgttggctaattagcatttaggagcctttctttactttctggcgtagtatcttttataatgcatgagggaccccaaaagagtgttttcccacctttttgacatcttgtctcttgctgcccactggagagtctctggattctcacttccttacttcttccccatgtccttttccactctcttcaggtgctcttgcatggcagccacactccaaaaactaatttccagccagttaatggagggagccagaaaacttgcgagaattgttttcctttctgtcccctttataataggaagctctacacctttaaaatgacaaggtagtaaatgaggggtagaagttaaaggggatttaaaatacaaatgtggttgggtgcggtggctcacgcctgtaatctcagcactttgggaggttgaggcgggcggatcacaaggtcaggagatcgagaccatcttggctaacacggtgaaaccccgtctctactaaaaatccaaaaaaaaaaagaaaattagccaggcgtggtggcatgcgcctgtagtcccagctactcgggaggctgaggcaggagaattgcttgaacccgggaggcggagtttgcagtgagctgagattgtgccactgcactccagcctgggcgacagagtgagactctgtctcaaaaaacaaacaaacaacaacaacaacaacaaaaaaccaaatataagagatatagggatatatagcaagtggaaagagcttgatacttctgtcagggagacctaagttgaattttgacctggcccccatttcttggctgtgtgaccccagaaaattgtgttgctttctgaggtttagtttgtcagtcttctgagagagagagagagagagagaaagattcctattcacagagtaatgtagtttaaatgagataatgtatgaaaacacttagcatagtatctggaacatagtagaagctcagtaaattgaaactgccactgttaataacagaatatttaagttagggttggattttctatctggagaggatatgtgaaacaactggcccgtctgtgacctgtgaaggaaaataccctaccaggccccaggattcaccattgctcataagatgcttgactaaagatgatgatggctccccactgccaggtagccaataggtcatttcagttcagttcaggtaaatgattaatggacagaattaggttctaatgtatattccgtactgttgtgacaaagtgtcaaagtgactttcttgatatttagtgttgttagtattcttttaaaagaatgtgcgggggtgggggattggtgggagggagggggaatacagaaataaaataacaactacaaagctaatgattaaaaacagcagctgtaggctggttgtggtggctcatgcctgtaatcccagcactttgggaggccaaggtggtggatcacttgaggtcaggagttggaggccagcctgaccaatatggtgaaaccctgtctctactagtaatacaaaaatgagccgggtgtggtggtgggcgcctgtaatcccagctattcaggaggctgagacaggagaatcgcttgaacctgggaggcagaggttgcagtgagccaagattgtgccaccgcgctccagcctgggcgacagagtgagactctgtctccaaaaaaaaaaaaaaaaggagagctggtccctctctgatccctgtcctcaatggatttacggtttcaggagagaagacagagatgcatgaaacaatgagtggtgtagattgtaagtgctgaaggagtcagaaacaattcagaagaggctggggtgacagggactggcttctttgagtctgagggctgttcataaaggatgggtaggaactctgcatgcagaaaacaatatcattgggcctagggacagctgaatgaggcagggagtggggcacaggcacatctgtgagtaccagtctgaatggagcagaggtggctgtggggagtggtggcaagtagggtttgggcacaggaggaagccctgctctggatgggtggcatcaaagactacattctttttttttttttttttgagatggagtctcacttcatcacccaggctggagtgcagtggcacgatctaagctcactgcaacctccgccccacaagttcaagcgattctcctgtctcagcctcccaagtagctgggattactggtgcctggcaccgtgccgggctaatttttgtatttttagtagagacaaggtttcactaccttggccaggctggtcttgaactcctgacctcgtgatccaccctccttggcctcccaaagtgctaggattataggagtgagccattgcgcccggcccaaagactacgttctttaactgacttcaacttttagtctctttggacctaattttccctgcttataaaataatacttctcaacagctgcatggggcttacacctaaataattttgtctgttcacttcagtaggcagttatgagtgcctgtggggggccaggcctgtgccaggctctggggatacaaatattaacaagctgctcttagggagccttcggtagaggtaacatgctcacaaaaggtgtcctgggtctgtctgagcggttggtggagtaattcttactctgtcttatgcgtgggcctcatgtgaacattctaacctggtacgatttagtagaacacttagcgtgttcatctcaagttagcggctaagaccacagtctgacatagttaactgtgcatttcttgcatccatcccgccctttattctggagggcagttcctgagtagaaagcatggtttagggagagagtaagctggacaggtgcggtggctcacacctgtaatccagcactttgggaggccgtggcgggtggatcacctgaggttaggagttcaagaccagcctggttaatgtggcaaaaccccatctctactaaaaatacaaaaattagctgggcatggtggcacgcgcgtataatcccagctactcgggaggctgaggcggaagaatcccttgaacctgggaggtggaggttgcagtgagccgagatcgtgccatttgcactccagcctgaatgacagagcgagactgcatctccaaaaaagaaaaaaaagagagagaaagcctagccatggtgtgcgaggctaagaagtgtggtggaagaaagagtacttacttgtatttcttaattttctgttctgcaacaagcttcaaaatgttaactgtcttaatctcagccttccacaactgcttggagttggatgacatacatggggagttccccaagtcaggtccattgtgtctgcagcagtttgcagttttccttgtgttggctagaaaaagttttcagaaaatccttttccaagagtaaagtttagattcaaagatcagtgagtagttagttaattctgaccagaatattgggggtggtgggcatgtattctcttcattgttctgctttaataaacaggcaagaagcagatattctgttgcagagtttgtttgtagactgactggtgttggacataaactacttcataatatcctgtgaatggtagacgtttaacctggctatttgtaccaagaatagttagttgtccctcagattgctatgtgtattagggttctctagagggacacaactaatagggtagatgtttatattaaggggagtttattaaggagtactgactcacacaatcacaagatgaggtcccacagtaggccatctgcaagctgagaagcaaggaagccagtctgagtcccaaagctgaagaacttggagtctgatgttcaagggcaggaatttgcaaagcccttttgcttcagtcattttatttagtgttcacaaccttgtgagatatacaggaagataactggaaggaacttataattattaagtaccaactatatgcaaactctgtacatagaatctcatttaaccctcacaacatttaactatttgggtgttatcatccctgtatcacataaggaaatcgaggctctgagaagttaagagacttgtgcaaggtcaatggcagagtgaagcctagaatctactcctgatccagtgctcattctgtgctgccatttatgttactttttgcactctgagctcatgattcagccgcaagggaatcacctggagggcttgttaaaagtggatcctaccctcagagtttctgtttcagtaggtttggggtgggaagtagcattctacatttctgtcaagttctctagtgatgctgatgctactggttcacttcgagaactgtagttcttgctttgaagttctgtttctttaatcttttctttatctttcttcaaacattaaatgtaggttttcttgtggacaggctaaaagagtgattatttagaatttgttcatttatttattcagtggccctgtactatctgtatatagcaagctgagaatttcccagtgtgtaggtatctaaattagatcagatagaaagtagttgcaagattggatagataaatgcagtaaggaaatgtaggaggggaggggtgacctcaggtggtaataataatagctaaaggcttttgggttttttgtttgtttttttgtttctttgttttccagatggagtcttgctctgttgcccagggtggagtgcagtggcgcgatctcagctcactgcaacctccacctcctgggtttaagggattctcctgtctcagcctcccaagtagctgggattacaggtgcccaccatcatgcccggctaatttttgtattgttagtagagacagggtttcaccatgttgaccacgttggtctcaaactcctgacctcagatgatccacccaccttggccacccaaagtgctgggattacaggtgtgagccaccatgcccggccccgtttttggggttttaaaaaaagtttaatgttgtattcctatgtgccagagactgaagtgggcactttatacatcttgcagtcattcgatcctcacaacaatgctgtgaggaaggtactgtgattatctccattttcagatggggacattaagacaatgagaaagtatggaacctacctaaggtcacacagctagcagtgagggagctatagtctgaatgcagcattctggctccagagctggtatcctgtcacgctgtgctgccctcagcaagagtaaagtgaggaggaacactgtaggagggaaggaagaactcaggaaaactctgaggaggtggtgtctgctgagcagggctttgatgaatggggaggatttggtttgtgtagaaatggaaaaggatgtttggtttcttggcagagacaacttgagcaaatgctggatgttaagaggtaggcgggggtgatgggatttattctgtgtgcctagcaaaggggagtgatagggggtgagactgggaagggaggataaggcctgattgtgtggagggcttgcttcatatgttggctaagtagtttgaactatattttagaggtactggggaggcatgaaagacttctagggaggggaatagcatggaagcatgaatatcattacagaggtagggagatttctccttagcagtcaccagaagatcattctctctaccatgaaagcccgcttctgtgcagaattggggagggaaggtgggggaaggaggggggatgtcagctgtggtcaagggtagggacactgtctatgaagccccctcagaaacagaaaggtgccaaggcaggttgatggagcattgagaagaagtctagtctagagcatttgtccttaattgcctggacaggtcttaaaacccctgacattgaaagtcacgtggggcgtcagcctgctcctcctcctgctctgtttatcatatgcaatgacagggctgacctattcccagggcttttctagaggaatgccactgcttaggagtgggctatcggaatatctaaaattctcatataattgtgctttttatttatttattttttttgagacagggtcttgctttgtcgcccaggctggaatgcagtggcaggatcgtagttaaagcctcaacctactgggctcaagtgatcctcccgcttcagcctcccaaagtgctgggattataggtttcagccactgtgcccagcctttcattgtgctttttacaaaacgatgtataaccgatagaaaatatgaaagatatagaaaaaatgcaaaggagaaaaaaatctccacaatgtgcgtcctcacaaatttgttgagatgcttatttcacataatggaatacttttgtatttcactcttcatcttctcatgccttgaagaggcgacattgtagaacaacttttagcatatttctgtataatctacatttatttatttatttacttgggatattaggaaaggaaaacggtgtaaatacattgcccagaggagcatcagttaggggttgttgctcttgacctagcagataaatcacccagaaatgttgcgctaacctagtagtctgagaagatataaataacattcaggcttttcctgctgacccggcttgttgaggttaaaagaggcgacttttaaaaccagtctcagacttggttacatatgttattgctccctccaaccttcttgatttaggagattctctgcttttctccattcagtcatcaagcctgatgcccatcagccctcacctcttcctacaggcagccttcctagaccaccctgtttatggtgatgaatctcttctctgagctcacagtgcttgctatccatatcattcatttggctcttctcttatctataaaacagaaaatattacttgtcctccaggtttttgtgacgattaaatgagataatgtgcttaaaatccctagcacggtgtcctgcaatcaactaatatagacttcttgattccttccctccactgttactgttgttatttatcttgtgttatttatcatgtgtttattgccataccttctgaataaggctggaggctcctctactttctgtttccttgtgaccttcacagcacatggtagagtatattcttcatagttattcactctttttgtcactggtatttagcatctttgaaagctaacattactagccatcatttcctggcccctcaccatgtgccaggcaccttgctgagtgctgtgcatacttatctcatttaaaaatttttttctctggaagcactgttatcttcatcttacaggtgaagaaatagagacttaaaggggttcagaaacttgcccaaggtttcctggctcaagtaggcggagcggtcctctccagccaggggctctagctccagcgtttttctttgttcatgttgccttttagacatcaagcatggtctgtttccatttggacaagaaggagcctaaactgatttcaaataggaattccagaaagatagcatagttccaccaataggaatgtggattcccattgctctctctttgttctcttccagcacttagcactctttgttctagattggagtcagtcccatctttgcttctcgatgcgactgcttttgtatgagtccagtaactgtgctaaaactcagtttcccaatctgtaaactgtggtggtgaagggagtacaagaacacttgcaccatcacatcttacaggggtcaagtgagtatgtaaaagcaaaatgtgttgttatgttttacatcatttagactaaatgttccatgagggcacctgtttctatttattctttaaaaaaaaaacctgataaaatatatataacaaaatttacattttttttttttttgagacggagtctcactctgttgcccaggctggagtgcagtggcacgacctcggctcattgcaacctctgcctcccaggttcaagcgattctcctgcctcagcctcccaagtagctgggactacaggcacgcgccaccacgcccagctaaattttttgcaattttagtagagatagggtttcaccatgttggccaggttggtctcgatctcttgaccttgtgattccacccacctcagcctcccaaagtgctgagattacaggcgtgagccaccacaccaggcccaaaatttacaattttaactggttttaagtgtgcagttcaatggcattaaatatattcacattgggccagtcgcggtggctcatgcctttaatcctagcactttgggaggccgaggcgggtggattgcctgagctcaggagttcgagaccagcctgcgcaacacggtgaaaccctgtctctactaaaatacaaaaaaattagccgggcatggcagtgtgcgcctgtagtcccaggtactcgggaggctgaagcaggagaattgctagaggaggaggttgcagtgagctaagatcgtgtcactgcactccagcctgggtgacagagcgagactccatccctaaaaaaaaaaaaatatgcaacaatcaccactggccatctctacaactcttctagtcttgcaaaagtgaaacaatatctccctgttccctcctccccccagcccctggcaactaccattttactttgtcactatgaatttgactactctaggaacctcatataagtggaatcatatatttattatgaaacctcatataaatggaatcatatagtatttatcctttcatgactgacttcacttgcataatgtcttcaagtttcatctctattggagcatgtcaaagtttccttccttgttaaggctgtataatattccattgtgtgtttataccacattttgtttattcattcttccattgatggtcacctgagttgcttccactttttggctattgtaaataatgctgctatgaacatgaatgtacaaatatctattcatgtctgttttcattttttttttttttttgagacggagtctcgctctgttgcccaggctggagtgcagtggtgcaatctctgctcactgcaagctccacctcccgggttcacgccattctcctgcctcagcctcccgagtagctgggactacaggcgcctgccaccacgcccggctaatttttgtatttttagtagagacagggtttcatcgtgttagccaggatggtctcgatctcctcacctcatgatgcgcccgcctcggcctcccaaagtgctgggattacaggtgtaagccaccgtgcccggcccttcaatttttttttaagagacacgttctccttctgtcacccaggctagagtacagtggcatgatcatagctccctgcagcctcgaacttctgaactcgagcaatcctcctgccttagtctcctgagtagctaggactataggcatgcaccaccattcccagccaattaaaaaaaaaattatttttttgtagtggcaaggcctccccatgtatcccagactagtcttaaactcctggacttctcggactcaggtgatcctcccatcttggcctcccaaagtgttgggattataggacgtgaacccctgcacttggttcatttttttttctttatagtagccatcctaatgggtatgaattggtgtctcattgtggttttgatttgcattttcttcatgattagtgatattgagcatcttttcatgtgcttgttggccatttgtatgtcttctttggagaaatgtctgttcaagtcctgtgcctagtttttaattgggttttgttgttgttcggttttaggagttctctatatattctgaatattaatctcttatcagacatgtgatttacaaatattttctcccattctgtgggttgcctttttatactctgtttatagtgtcctttaatgcacaaaagttttaagtccagtttctctactttttcttttgttgcttgtaccttccgtgtcatgcccttatctttcagtcgaatctaacacaatgccttaaagataaggatggtgctattagtagcagtcagaatgtctctccttactaggtactgggttatgtagtttacatgcattcttttctttaattcccacaacaattctgtaaggcaggtattatcactctattttgtttttttggagacagactctcactgtgtcacccaggcctgtcagtcatattttaaaagactaggaaactaaggcttagaagtgaaataaccagctgggctcactggctcatgcctgtaatactagtattctgggcagccaagatgggaggatcacttgagctcaggagttcgagaccagtctgggcaacatggcgaaattccgtctctacaaaaaaatacaaaaattagctgggcatggtagcatgcacctgtagtcccagctacttgggaggaggctgaggtgggaagatggcatgagcccaggaggcagaggttgctgtgagctgagattgtgccactacactccagtctggttgacagagccagagaccctgtctcagaaaaaaaaaagtcaagtaccttcctcaaggtctgtggattatcagtggcagagcagggatttgaacccaggtctgtgggcagcagagctggtgctcttaaccactaaaccagagagcttagtattgtttgtgggattgagtgaatgaatgcctgaatgaacttggtagctgaaaaatctagtaatagttgtcttaaatccagacctacactagtattgtaaattatgtactcagtttcagttttcctcctgtaactcagtgtacaagtgtcctcttcataccagtaagttttctgagaatttcctcaaaggacgtgctttcttatatcctcgctgaggcacttcttagtaatggaagacctgtgtattttactttctctttggatttgccttagaactacagtgatggatggaggaaaagacggaatttaaacacatgctaaattgtctaactgaccaacttgcttttaagacatcaccagctgctcttttaatcattaatgaagcataagccttgtagtctgggaggcatgtcaaaaattctgtttcgggttttggtttaaaattgagtgtaatggagagagactgattctttcatctcagagaattgggctgtctttgagagctggggacaagaactgggtcctgtaataggacactgtggagttttttttgctgctcctcaaaggagaaatcacacagatttctggcacgtcattagtcgaaataggaaatgaggcctgagaaatgatgttgcttggggtttgaaagctgaatttgctagtggcttccagagagcgagagtctcctatgctaactgtggaaattcttaaaccagcaattcaaagaatcagaagactctagttgaaagggtcttagtggtatttggtccaaccctctaatttttgcaggttgtggaaacaaggccagagagggtgtctgtgatgtatgacatttctgacagcaaatgtgcagggatttttttgttgtttttgtcttttttctgatatcaaatggatgtcctacaattgaattcagttttgacactaactacctggagctggtgcggaccccagaggttaagggctcagtcccacaagactgcccccacttcacatgccagtcacaagttcctggttaccatctgtacttcccatgaccggctataaattggggattcccgtgatgccttccccatgtttgatcatatgcttgaatggctcacaaaattcaggacaacactttacttacattttcgtgacaaaggatataactcagcaacagccaaatggaagagattcatcgggcaaggtgtggggaaggggcagagaacttctgtgccagcctcccagcacctttatgtgttcaacttggaagttctttgaaccccatcgtttaggggtattaatggaggtttcattatgtgggcatgagtgattaaatctggccattggtgaataactcaacctctagtccctctcccctttccggaggtaaggtgggatgagggtacggctaaaagttccaacactgaaatgtaccttggtctttctggctagggagccccaatctcattagcatacaaaagacacttatctctcaggagattccaggggttttgggtgaggtgtgccaggaacctggacaaagaccaaatatatatttcttactgtatcacagtaggagacttgccaaggtcccacagtgactcagttttatgactcttacatgtcttcctatttagctcacagcctcttgccagtcatttagatatttgtatatgggcagggagggtaagcatggggtagtaagtctgtcattttaatggagtggaaattttcaactcagcctcatgaaggtaaatacattttattgtttgaaagttagtctcctgtttttgactgggcttggttgggggtactatttagctctagatttgatggtttaaatgaaattagctcataaaatcaccaatggtcttctgttttatctactttttctggcactggtccagaccagagaaaccaatcccaggctaggactgggaaagtctgggactgttcactgctctgctgctgatttgctgtgagactttgggtggggcacatcctgtcagttactcatttgaagagcatggtttgttcgttcgtttgttttgaagaacagaggttgaacaagctttccaagttcatttcagacctaaagcttaaggcccaaatcaaagtggcttttagtttttcttttcttttttttttttttgagacagagtcttgctctgttgcccaggctggagtgcagtggcacaatctcgacttactgcaagctccacctcctgggttcacaccattctcctgcctcagcctgctgaatagctaggactacaggcgcccaccaccacgcccggctaattttttgtatttttagtagagacggggtttcaccgtgttagccaggatggtcttgatctccggacctcatgatccgcccacctcggcctgggattacagtcgtgagccaccacgcctggcctagtttttcttaagacttacagctttccataagagactgtacatacctatgaatcatatgtgtgtgtacgtgtgtgtgtgtatagcctgtgatatgtaagtatatacacacatgtaaatacatgcacacaggtaaatatatacatatacatattttatatatattttatataaatatgttatactttatatatattttgtgtaaatgtatatatatttgccttctaatgattttcactgaggtagtttacttgtagtaaaatgcatacattttgttataattttgacacatgcttacatgttgtcaccttaccccatcaagatacgcactgtcaacctcaccccagaaagctccctcaggtcccttcccagttaatcctctcctccaacacactgcagagggaaccactgatcttttatctcttctagaagttcatgagtggagtcatacagtatatgctcttttgtgttgaatcccagtgatattttgaagaagaatcatatgcattgttttctctacctgccattttgaaaggctgtataagggagtggtggctcatgcctgtaatcccagcactttgggaggccaaggcaggaggattgcttgaggccaaaaatttgaggccagcctgggcaacatagcaagaccctgtttctacaaaaaatttaaaaattagctgggtgtggtagtgctactccctgtagtcctagctactttggaggctgaggcaggaggattgcttgagcccaggaggtggagactgcagcgagctatgattgtgccactgtactcttgagaggtgacagcgtgctggcagccgttgctcgctctcaggcgcctcctcagccccgatgccttctctggctgtgcttgaggagcccttcagcccgccgctgcactgtgagaacccctccctgggctggccgaggccggagccgcctccctcagcttgcagggagatgtggagggagaggcgcgggcgggaaccgggctgcgcgtggcgcttgcgggccagcgcgagttctgggtgggcgtgagctcagcgggcccagcaccgcaggccccgggcagtgaggggcttagcatccaggccagcagctgcggagggtgtgccattcccccagcagtgccggcccgccagtgctgtgctggaattctcgccgggtctcagcggtctccctgcggggcaggactctggacctgcagctcaccatgcctgagcctccctgccgtgggctcctatgcggcccgaacctccccaaggagcgcaaacccctgctccactgcgcccggtcccatcgaccgcccaagggctgaggagtgcaggcgcactgccagggactggcaggcagctccacctgtgacccaggtgtgggatccactgggtgaagccagctgggtttctgagtctagtgaggacttagagaacctttatgtctagctaagggattgtaaatacaccaatcagcactctgtgtctagctcaaggtttgtaaatgcaccaatcagcactctgtatctagttaatctggtggggacttggagaatctttgtgtctagctcagggattgtaaacgcaccaatcagcaccctgtcaaaataggccaatcaggtctctgtaaaacagaccaatcagttctctgtaaaatggaccaatcagcaggatgtgggtggggccagaggcagtagtggtaacccacttgggtcctttttcgtgcgggggaggctttgttcttttgctctttgaaacaaatgttgctgcttactccatgagtccactgcttttatgagctgtaacactggctgcaaaggtctgcagtttttctcttgaggctggcgcagaccacgaacccattgggaggaatgaacaattccaggcggtaggagcgaacaacttcagacacgctgccttaagagctgtaacactcaccgcgaaggtctgcagcttcactcttgaagccagcgagactacgaacccaccaggaggaagaaactcagaacacagctgaacatcagaaggaacaaaccccagacacgccgcctttaagaactgtaaaactaactgcgagggtctatggcttcattcttgaagtcagtgagaccaagaacccaccaattctggacacactctagcctgggtggcagagcaagactccatctcttaaaaaacaacaaagaagaggctgggcgcagtggcttatgcctgtaatcccagcactttgggagtccgaggcaggaggatcacgaggtcaggagatcaagactgtcctggccaatatggtgaaaccctgtctctgctaaaaatacaaaaaatttatctgggcttggtggcgtgtgcctgtaatcccagctacgtgggagatggaggctggagaatcgcttgaacccgggaggcagagattgaggtgagcagagatgtcgtcactgtactccagcctggcgacagagcaagtctcttgtctcaaaaacaaaaaaaaaaaaaaaaaaaaaaaaaggaattgtgtggtctggggtcctgccgttcccactagctgctgtggtttgagaagtgagggccctctgccggtgaccaccatattgtctgctgagtatgatagaagaggtggagagaacagcttgatttccagattctaggttgagtttgtttctataattgttggtgtcacagtcttctcacttgtcagctgggcaaatcagatccaccagcagatgagagactaactatgacacccgaaaatgtcacttgtgatggcacatttctgacaaggtgcccatgagatgcaatcatttcaattccataaatgctttttgaacataaagacattgctctagggtgagcaacagcaaaagaaacggaggtcaggaaggggctgagcaaatggatggaggagccacactgccatggaggttctgggacctctcttggccttagagcgtagtatctgtgtgagagttttttgtttgttttcataatgtgtttagcatgtgtttgctcttagttttctcctcctctaacttagtccagcccttggtcatgcctggaccattgcttgaggctgtaagttagaccagttcaataccacctagctggtctcctccttcatattctccctccctttctacactctggaaccttccaaaactttggacaactctaccagaaaatttctggaactccccatctcctttagaatgatttataaatagggccaggcgcggtggctcacacttgtaatcccagcactttgggaggccaaggtgggtgggtcatctgaggtcagtagttcgagactagcctggccaacatggcgaaaccccgtctctactaaaaatacaaaaattagcaggacatggtggtgggttcctgtaatcccagctaccagagaggctgagacaggagaatcatttgaatctgggaggctgaggttgcagtgagccaagattgcaccattgcactctagcctgggtgtcaaaagcgaagctccatcacaaaaaaaaaaaaaaaaagaatgatttataaatgtagcctggtgttcaaggccttcactgactgggcttcttcccgtcttttctcttaccaaggtctctacttactttgccgttcccactccctccttttctgtgctcagcatggcctttggccctgcaaagcatcccttctctcttgctcatggtttagaccaatataccctttgaaacctaacctagatcttcccactgccacaaagctggcccagaagcctctgaactgcagtggcacttataacttatatgtatttaataattatctgactatttgaatgcactatgttgagccggtgggattttgaattcaaagatgaacaatgcttgccctgtcctatgcctgtcctgagagtggctaactgtacagggtacaagggaaggcatccttgtgtgacttggaagaagaggcaaggcaatgaacatgcatagagcacctgcttgtgcaggggactgtgctgtgttctttcaagattttatctcatttaaccctcttgactttgtgagatggcatttttacctgtgttgtgactttctcagaatcacacaaccaacaggattgaaacccagtgaggcccactacacaccctatgtgctccccccactcatgtgtcttcatgtgtgttgggctggtgggggcaggtcagtgaggtcagctgtgggctgtttctacaccccatccatgtgcatgctgtggggcacaggtttcctcctgggttaggggccaggtgatgcttaaggctctgcccccatggtggtccctatttgggatctgcctcttaaacagttggtgacgccttttgcagggacagtggttctctgtcctcctgaggtggggaaagtgatccggggcactcctgcttgtctctagcaccttacaggaatactgcagcaaccaaactgctgcttcctgattaattcatgctcaaggaccagaatgactctctgcagtcttttgtttttatggtggtaaaatacacataacataacatttacctttatttatttatatttttttgagacagagtctcgctctgttgcccaggctggagtgcagtgacaagatttcggctcactgcaacctctgcctccccagttcaagcagttctcctgcctcagcctcctaagtagctgggattacaggtgtgaccaccacgcctggctaatttttgtattttttttgtagagatggggtttcgccatgttggccaggcggtctcaaactcctggcctcaagtgatctgcccacctcagcctcccaaatgaaggggtggggaccagtctgttgggcatggcgtcccagaagccccattgcagccctattgtggtgggcaggctgcttttgagaatgtgtatacaccttttcaaccttcctgttctgtcagggcagcggaggaggaagtgtgcctcaggtggctaaggggccttcctgcagcaggaccagcattccatgttgcttcttactccagtgttcctctaccccagaggctgccttctctttggtcttttgtgcatactgggcatcctaaagctgtttgtttgcccttcagtgaatgggactgacacagagacccatttttgtttttaaaaattataaaatataggctgggtgtggtggctcacacctgtaatcccagcactttgggaggctgaggctggaggatctcctgagcccaggagtttgagaccagcctaggcaacacagtaagaccttgttgctacaaagaatatttaaaaacttagccaggggtggcagcacgcacctgtggtcccagctcctcaggaggctgaggcaggaggattgcttgagcctgggaaggtcgaggctgcagtgaggtaagatcacaccactgcactccagcctgggaacagagtgaaatcctgtctcaaaaaaaaaaaaaaaaaaaaaaaaaaaaaaaaagaaaataaagaagcacttactgtataaagagtgagcccttaatttctcagcccaactaggctccccagaggtaatcagctgcttagtgtgtggcgcatgttccatgaagtttcttttgtataaatgggatcctactgtaggcttcattttacagctcgcttttgttttgccatgtcattgtacattttggagacctttccatggcaacataattagatctatctcattgtgcaagcattccacagaatggatgtacagtttatatagccatcctcctcctggtgggcagtggctttcttgtccttataagtaatactggaacagcatatctttgtgcatttctatatttgtgtagtttagattcctagggacaaaatgctcatgtcagactataagagtattggaaattttgatggagactgccaaattgccctctaaatgagcccctcaccaacagagcccgagtgactgtttgccttgcactctcatcagtactgggcatcttttaatttctacacatctgaggaggggaaaaggcatttggttgttggtccacattgtctaatggaaaaccacctctaagatgtgtggatgaaagttgccttcggctaacttccttcctaagcaccacgtccccatggaaatgcagaggtagagaatgcctgctggtggagctgcccagactcgttcctcctgcatccttggcctccccttgccctgtaaaaaggctatgcaagacctttacgtttcttgaaaggttttttgctaaaaaccctttggtcaccattcttcagttaattttcatatggtttttatttatttgccttacctgtctgctactcctgaggaaaccaaatttttctgttgccactccagggcagcaactttttatgcacaaactcaaattccctgcattttactggtgacacatgaggcttgagaatctacagtgtctacccaagtactaaatgttcctccttttcatctctaacccagtaagacaaagtgagatcaggcattttgtatattctttaattctagtcagaacagagaagtatgattctgtttcctctaaatcttatgaacgttctcagagactggatctcagatctggtccctgccagagttaggaaagggctgggtgggcgagggaactgccgtctactgggtgctggtcattttccttgcagccccgcaagggagtgggtattatcatctaggatttatggatgaggctgattgacatcccagaagcctctcagggagtaggtagcagaaccaaaacttgaacaggtctgccccacactaaagcccttacctggcttgttaggttggctccaggtagatccctggagacatcctgccagggatcttccccctagtggggaagatgaaacagcacccccttcctggtaggtcctccctgcccataggccaccagaaagaagaaactgcagtgtctgatctttcttttccctctgcaccaaggctctggcctaggttttcccagatcttgcagtttccattctcctggggactaccttcatggttttcccttatctatgagccacctatgctgtcacagattttctgtgtattgactaactttttttacttgggcacattttcttttaaaaggcttctatcactctcaattgaaaagtagtttcacttggcattaatctaaagtaacataaaaattaaaataaataaatacattgaaatcaaagcaagattcttctagcaggatcctgttgtctgcctaaggctccccgccaagactcactctcattagaatgggagcatacaaagtattggaacagcgaccaggtgcagtgccatgccacttaagcccaggagcttgaggccggccttggtaagatagcatgaccctgtctctaaaaaaaaaaaaaagagaggctaggcatagtgactcacgcctgtaataccagcattttgggaggctaaggcaggcagatcactttaggtcaggagttcgagacaagcgcggccaacttggtaaaaccctgtctctactaaaaattcaaaaaaaggagccgggtatagtggtgcattccagtaatcccagctactcggaagactgaggcacaagaattgtttgagcccaggaggtggaggttgcagtgagccaagagcgcaccactgcactccagcctgggcgacagagtgatacgccatctcaaaaaataaaaataggcctggtgtggtgactcacacctgtaatcccagcactttgggaggccgaggcgggcagatcacgaggtcaggagatcgagaaacatggtgaaaccccatctctactaaaatacaaaaaaaaattagccaggcatggtggtgggcgcctgtagtcccagctactcgggaggctgaggcgggagaatggtgtgaacccgggaggcggagcttgcagtgagttgagattgtgccactgcactctagcctgggtgacagagcaagactctgtctcaaaaaaataaataaataaaatttaaaaaataaaaataaaaaatagagagagagaacagattcagtgttataacattgccctggcccacctaaacttgcccactggtgatctgcaggccactctctgaggagtgctcttctgccttctggccactggactgtgcaccttttcgggacacaccaccagccttctggccgttgcttctgtccttccttccccaggatggctgtctcatctgcttctcgcttatgtgggagattctgctcctgcaaggtgaggcttggatgccacacttactgagatatgtcctctgaccagagagccactgtcttcaccccaggtgccctgatgactccctgttaacttttttcatatacccaccctggcacaggtcagattgtagcatcggagtggggtggtatttatcctgtaagactctagctgctggaaggggcactttgtaacatttattctcctgacccagttgggcctccttgggggctgagacaggctcttgtcagagatgaagccttgtgatgtggcattgtctgcactgggccctatgctctatgctctgccgtgctagatgttcagtaatgtcgtggatggtgagctgggttttcctggcacgagttccacactgctgttccccattggagaacatcacctagcactgggaaaagatgaaggtggagacccttaatggcaggtggcaagaataaatatatttggggtaaaaggctcctgtgtgagaaacgcatggcatgaaacccacatggagggtccctgagaacactcaattaaggtgtccctgacctgctttcacctcatggctccagctccccattctctggtctatgggacagtcactctgtatgtggccccttctggcattttgacccctgcttggcactcttaactttttggctttgcccaatacttactctgagcagccctggctctgtactccaactctttccccccacccctcacagggtcagcacagatcatgggggtctttgatccatcaggcaataggagggaggctgggtgtggagagtgtggggttgatagggggaagcaagcccttcctaggacccctgccttgctctgggcactccgctgatctcactcttagcaagagggggtgtgaactgaaggcagagccacagggctgctcagcaaggctgtgctctggggctgctttcactctaagaaagggccaccttttttttttgaggtgaagtctcactctgtcacccaggctggagttcagtggcatggtcccagctcactgcaacctccacctcccgggttcaagtcattctcctgccttagcctcccgagtagctgggattacagacgtgcaccaccatacctggctgatttttgttttgtatttttagtagagacggggtttcaccatgttggccaagctggtctcaaacctgacctcaagtgatctgcctgccttggcctcccaaagtgctgtgattacaggtgtgagccaccacacctggccaagggggcacattttttgattgcacagaagctccatatgggctagcagcagctctggggggctattgccctccccagctgtacttgacactctctccaaggtagggactagggcgtatttatcttggtatcaagattatccagtacagcaagtctcagtgaaaggttgataaacagaatttagtacacttggtctttcaaaatgaaactatttgactaaggaacttaatgaaagacaaacattgtatcatgatacagtcatttaatgtctctgagccttagtttcctcaattatgactaatatatatctcttagaattgtttaatgttcaaattggataatgcatgtaaagcacttgactcattaattttcttttcctccatcaaaagtatttctgaaatgagtggattctgaatttggactgtaaccaggtatattctggaaagagtatatatttaaaaaaaaatagaacaaagatttttctttattttaacagtgtgacccctcatgctaccaaaagaaattaaaaatgaatacaacttgttgtactttctggaaagaacaaaatcttcaaaatcagacttcactttgagtcccagctccagtaacctctttgagcctgagcttcctcatctgtaaaatgaggatagaagtcctatttttaaaagtatgtgtcggggcattaaatgagacgtttgctagggctaccataacaaaataccacagactggaaggcttaaccgaacttattttctcatagttctggaggctgaaaatccaagatcaagctgcaggtttggcttcttcagaagcctctttccgtggcttgccaacagctactgtcttgctgtgtcctcacatggtcattcctctgtgcatgcatgattggattagggccccattttaacttaatcacttctttaaagaccctgtctccaaattcaatcagtcatattgtgaggtactggtgcttagggcttcaacatgagaacttgaggatggcacaatttagcctacaatatttgcaaaacagaaagctcactggcctgggcacggtggctcatgtctataatcccagcactttgggaggctgaggcagcaggatcacttgagcccaggagttcaagaccagcatgggcaatatagtgagacccccccaccgtataaaactgaaaagctcactggatggtagtagctcttcctatttaaatcccagttctagtgttctttcctgttccttgctgaagattgtatttactgtgtgggattgtcctgagggctggtataactagttagtactttcctaaccctgaggcacttctgttaaaattagatcaacacttaggctggcacggtggcgtacgcctgtaatcccagcactttgggaggctgaggagggctgatcacttgaggtcaggagctcgagaccagcctggccaacgtggtaaaactccatttctactaaaaatacaaaaattagccaggcgtggtggcacatccctgtagtcccagctgcttgggaggctgaggcaggagaatggcttgaacccaggaggcagaggttgcagtgagccaagattgtgccattgcgctccagcctgggcgatagagtgagactctgtcttaaaaaaaaaaattagatcaatacttagaccaatataatgagctgatgtttagagagcaaaacaggcctcctgcagcctctgcacccatgagcctagcttagggtcagtaacttgtggtttagcaaaaaacagacttaactttataatgttagcaaaggattaagttttaaatatatcagaatcgagatgggaaagaaacctaacaaagtgctaataaaaaatagaattgggtaaaaatattatgtttcatgaaagaagccagacacaaacagctatatattgtatgattgcatttataagaaatgttcagaatagacacatctatatagagaaaaggcagattagtggttgtaggaggctgggagagggggaatgggaagtgactgctaacaggtacaggatttatttttaggatgatgaatatattctagagttacatagtggtgatggttgcacaactctgtgaatatatgtactaatgccactgaattgtacacttcaagagggtagatttcatggtatgtaaattatatctcaataaagctcttatacaaaattgaattacggcagggtgcggtggtttattcctataatcccagcactttcggaggctgaggcaggcagattgctggagcccaggggttggagaccagcctggtctccaacatgatgaaaccccgtcttaccaaaaaatatgaaaaatttagccaggcaggcgtgatggtgcaccccagtagtcccagctactcatgaggctgaggtgggaggatcacctgagcccgggaggttgagactgcagtgagccatgattgtgccactgcactccagcctgggtgacactgagaccttgtctcaaaaatagacatcttttttaaaaaataaaaaaagaaaaaagattgaattagggtggtggcagacttatgtgactagcttttcttcttttttcttccagttttctataattactttttctctttttttaaatggaaagagtcctacatttcattaagatacttaagatccagttttatgtggtgctgaattatagctatgcagagaaagtctccgtgaaatattaaggtcacttttgctcacaaaatatcaatgattaactaagatgtataggctgtaaatagagagaagatgggtatgtatgtgataaggaagtttaatgaagtttcatcctatgtaatgtgggtctccctaagagagggtctatcttttcatcaatagcagatctgtggtctgtattgtctgatgaagtccacctggtattgcacattgaaatccatgtttgttttgatgtataagtgttctctcagagaacagctacttcccagtttgacactgttttcaatccagtgccaatgccaagagatttctgagccatatatatatttttaatgtaagttaaataattcatcaaggaatgagagagagagagagagagagtgtgtgtgtgtgtgtgtgtgtgtatgtgtgtgtgtggtgaaacatttggctctttccacctaatttttaaccttgttggtcctactggcaatctgtttcttagctaatgactgcataaaatcatctctgaaaagaaagctaaagacttttgcattaccttttgccagtttctgctttaaatccaccctttggtatttgcaaaggtcagatgagctattttggtgtccacggccctgattaatgggaaatcctacatttccattggccccggaggatgaaggattagtgtggcggcggcagtgcgggcagcatctgctgcaatgtcaggagtacggtgttgggaattgcaggagcatccggcctatgaaaaatggaggaggaggggagctccactagtactagccccagatgagtttttctccattgccatcaggcagacatctctgggagcatttgttctcctctgttaggccttgtcgctaagcatttaatatggagagcacaagtgcggacctcctgtttccccgccggaaggcttccatagctccctgttagtcggcatgtttgtgttcagcttttcacctctccttgtaggagacgttggttttatactatgttaaataaaaatcattgtgttagctcatagattttcacaagagaagcaggtgcctggtgctttggggagaataactccaaatatgggaatctctttccccacccaagagcagatggtctgcgttagtttgtcttgtgacctttctttgcttctaagacaccaaatctctgatcccacggatcataaatattctttaggtttgcagccatggaggtgaagggagcgtcaagctgtcggtgtcattttccatttgtctggaacctttcaaagaaactgttacagcatttttaggcactgaattagcctcctgcagccgtgagcttacagactcatgaagggcaccgcagcaaggctgcctcagccaaggtcaggaaggagccctctgctcagcatccctttgctcagcatcctgccgtcctcacctgtccactcaccaggcagcctctcacggcagccactttgtgccaggcaccatgatggcttgcacaacccctgcctgcctatccgggggctgcattatttatgtcgctagtagtgttaataagcaccttgtattgatcaccttgtctgctgcctctccctgccctagagcccaccttctcatccagaggaagaccctcaagtgcagtgtgggggtgctctgataatgtagcagcatgcactgagaggggcagagtaaggactgccttcacaaaggaggtgacatctgagctgctctctggtaggagtttacctggagggggagggatgtgcaaggaagagagaacattggagaaaaggggcctgtatgtttgtggcagctagaccttgggctctggatgttcacgtggggccctggcaaggggtaggaagtggaagtcagggctggttagagatagtcaccctgaggatcaggttgaggagtgtagaccttatctgaagtgaagtggggagatctgggaggtttttaatacttagggggaagatgagatcagattttctgtttggtgcagaccacctggggcagtgtggagtgtagactatggaaagagagagtggaggaagtgataacaatgaggaggctgcagcagcaatccccaagagagatctggaggcagctcagccttcgggctcccctttccatgcatttgcactggctgctccttctctcctttgccttcacattcctacattctcttttggatcatccacattctctccatacccaagtgttgttaccttgctgaggccttttctgcactctccaggcagcaggattcagccctctgtcgcaccccagcagcaggctggtctgccactatctgacccctatagagactgctttgccttcctaactccctagctctaattagcagcactttggacccatatcaagatggaaagaagaaagggttttttaaagtgactgttacagtggattggagaggactcagaatttggggacagaacataccccagtttgagacctgcttctgccttatgctttctccaggagatgaagtatttttttatttttgctttttcttatcatagaaaatttcaagcatagatatgaattgggagaacagtgtaatgaacctctgtgtacccatgactcagcttctaagcatctggccaatccaatcttgtttcatctaatcatcctcccctcccactctgcattattttgaagcagattccaggcatcatattactttataataattactttataaatactgaaatagataaagggctctaaaagataaacagctttttgtttacttctaacagtcttcatgtctctgagccccaagttctcatctgtaaaatggaatggtgatggcccatcccagggctgtcgcgactaaagctggcaaaagcctttcctggaattctgactgcttccttttctatactaactaccgtgctgatgtgactgcttatagtaccattgtaatgacaataagaacagtctttggagcagacaaacccaagtcacattctcatcccaacactgtatcttttggggcaaattacttactctgagcctactaagtagcctcattttttaaaatgggggacataatacctccctcatagggttgttttgagatttaaaagggaaggtgtacatatcggcccatacatatcggcccataataagatcttaatacttagtaactagtattataaatgtcctttaaattgatatgattttctggttagtatagtaatcctgcgaagtatatagtttttaatccccattttacatatgatatgattgagggttaaagccaggattaatgaacttgcctgagatcttggggctaatacattacagagccaggagtttgagcccaggtctgcctgaccccaaggcccccatccttattactgctatttattaatggaaccttgcaatgtggccttgtgaaaaagaacatgctgatcttgggtcaggcagatcagggtcgtctggtccttacttttgtctgctgttttcagctagtgctggttttttataagctggtgaactggattacaaattttccttagactcctttgtccatatcttctgccttctttctgcctctcgttttaggagctgttagttctcataagcccctgtaatggagagaagtagagagaacagaacattcaaataaaaagttcatgcacatcagctcttttgtgctacgtttttgtgggaaagtggctgagacttttgtattttagagatgaggtcttgctgtgttgtccaggttggacttgaccttctggcctcaagggatccttccaccttccctccctagtagcagggactataggtgcatgccactgcgcctggcttagaggctgaaactctttaaggcaaaatgaggttcataggttatctgtggatttttgtttttcagtcagccgagttagtgaggcatggacagggcttatgtatccatttccactgtaaaattgctaagaatggatcattggaagataataaatgtggcagagccagaaatcaaacccaggcctgaccaactcactgcctggctggttccattgttccactctgcctttagggacgggcaggtgagggacccacagggaagacttagactgcccgtggatatctcctcgtggcttggaatccctattctaaaagatctgatctagttctggcttaatgggagtcagcgtaatgatgattctcagctttttgtctagctttttcacatatgttttgttttcctgctgccatgaagtttaaacttgtttaaaaccaagattttaaacaaggaagccaagcatataagggagtcgtccatagtcatccgagggcagagccaggacacaagtgccatccttggactgcgaccagtcctcttcctgcacttccctctggaaagcccacttcctgcaaagccctctggaattgctcagcagtagtgccccaaccatcatgtaaggaaaagaatttcgagttggaacaggaacttcagggggccagtagcccctccccaaagttctcagagaaggggcagttagcaaacgtagaagcctttcttactgagatgacccttccacctgttcactggagaaatggtctccagtagctctgttctggggtgctatctctggacagccatcttcagaagtgtagtttcccctaagaaaacactagaacagattttagcagaagattgagaatcccaatggtacaaatcttacaagtatgatttgcaagcatcatagagaagcctcctttttgggtaggaatgcaaaaccaatcacctcattgctcgaatgacagtctggctttcttgggatccagccaagaaaacaatttatgagactgacccacacacttaactagctaaagctttgggctgtaatccagaatccttattatggaaagcagagttaaaactgttccctttgaaaccctgtggctatttatttgaattagcgaggtcaccccaatgacagctgtggagaccagcctttaattaggaaaagaatttgccttgaacttcatcggaatggcattgctgagggtcttgagtgcttttcttccttcattctttcaggcttaccttattcctgctctttgttcaggagtcacagctcatttcttccctgaaagcctgacttctccatgctctgcacccacaggactctctcctggctatggcatgccagagtccatccctgagctgggtgggggcagtgctgactctgaaattcaaattctccctcatattggcagcatgactttttggacaagttatcatacttttctgagcctcatcttcctcatctgtaaaatgattctaatagtatttattgcatagggttgtataaagctaccaattattgattactcttgctatatgccagccactcttatcagtgcttgacccgtataagctcatctcatctgagtaacaaccctatgcagcagaactcttcttccttttttttttttttttttttttttttgagatagagtcttgctctgtcgcccagcctggaatgcagaggcgtgatctcagctcactgcgacctccgcctcctgggttcaagtgattctcatgcttcagcctctcaggcagctgggattacaggcacccgccaccacacctggctagtttttgtatttttagtagagatgaggtttcaccatgttggccaggctggtcttgaactcctgacctcaagtgatcctcccgacttggcctcccagagtgctaggatttacaggcatgagccaccacacctggcccaaagcagaattcttaacacttccattttatagatgaggaagtagaggctactacagagcctcctacataatggggactcaacaaatgtgtttattgagtttgaatctttcccttacttatactttcattacatttataatctctgccctatgtttaacttttctctaagaatattgaatgtgtcaattttatcttcaaatttactttttaaactttgtgttatagaaaattttaaacatgcaaaagtagaatagtataatgaacttctacaaaccctttatagaacttcaacaattatcaactcatgacctattagattttgtcaatatgcataccctgcccatattattttgaagtaagtcccccaaatcatattatttcagcatatatttcaatatgtatctctaaaagaaaatgactcattttagaaacaatcacaatactgtgattgtacttttaaaatgtaatttcctatcatgtatccaactagtgttcaaaatttttagttgtctcataatgtcatatattttttaagactgaatagaatctgctaaggtctatcacaagtacagtgaggtgactgtgggcagtggctgggcacagcccatctgggaggcctcccatcagatgaaagttaaggttcttttcaactctaaaagccagctgccaactttttgcctggtattcgtctcaacaccaaaagttaggcactgttagggagagaaagtcacactagagagggctggcctctctttgcaaaggtttaattcagatggaagatacttcagtaatgggtagaaacaaattacttagaggctgtctgtatatcaaggttcttcattttatccttttcatcccattactgagtagctgcattataacttattggtgaaacacttgggttcagaggtcagacagaatggaattctagtccaggtgccactgcttgctgtgtgtgtgtctgggcaagtcatttagcttctctgggcggccccaccccagtgtatagaaagtgagaattataagtttcgacctagaccgggtgtggtggctaatgcttataatcccagtactttaggaggccaaggtggggcggtcactttagcaagacctctttacaaaatattaaaaaaaaaaaaaaaccctttcaacctttgcctcatggtgaggattaaataaagtaatgagttaaggcatgtaggatattataagtcagtaaaggttaggtagtattggtttgtgactatctgcctgctgggttgcgtccctgtgcatttatgagtatgtgggtagaagtggaatctggagagatttgtaacctcatgcctatcttgagtctcattggctttttccagagcacgtcgtcactccattctctagtggaggattgagtggctcctgtattcctccccagtgcctctcctggtagtcatttattatatagaacatcctagtcagagcgggactgttgtcagccttatgttaccagtgaagaaggcagcttcaggccactgcagtgaaatcaaaggcaccaagggtctaagaggtagaaggagctctctgggttgctgagggcaaggtcttaggcacagcaggcaccccttctagaacgtcctgccaggtggctacccgcccagacttgtatacctccagtaatggaaaactcattatctcataggcagcacatcccacgttggtctcttctccagttaaatgaaaatgacttgcttaattggatctaactgcctccctctcatttctacctgtagtcctgggtcctctcctcttcccattgcaccacgctgggtgagagggagtaacacagagggaggtctctgctcttggtggcattgtgttctggagagagccctccaaagcagagccaccgtatggcaaaatcccagtcaagcctttgtgtggacatcagtggagacctttctgtgagtggcaggaatggagtgtggttctctattaggcagtgtcagatgcaggtggactggtgagacatgaaggagaccaatgcgggagctgtctttaagcttaagagctatgatttggagcccagtgtggagtgctaacctttccacatgcccccctccactgtgcagctctctcaaatgtactttgttatgctcttgcatgagtggtgttcacctctgcattatttagtgtcatttatccttgcactttctcattcctacagcctgcaggaaaagagactgtagcatgtgggctgtgtgtcattgctgagcagtttgtcagccttagaaagctgctcatgagctgagagcacatgataccagcaggtgacgcaaagcctgcatgacttggggtcctcaatcactgggaaaggccctcccccactggtgacacaaaaaggcaggaaagaacctttgtttcatctggttcatatgtgacagccttcatttgctacagatctttggccctcaccattcttacctgtgaaagtcccctaatccgagcctgatgggacccaggtgtgaggcattgatcatggctggttattcatcaggggtggatattggcacacaggctaccatttccttattggttgactctgatcaaagataaaaataaaaatgtcggtgttccttgaataggattacagtagaatgcttgttacaaaaccggaggagggaattcattaggcttttatgatcatcacttctgtgggaggaagggttcatgttgaatagcctgccagataactctggaatatgtaccactggagtagggacaatttgccaggcattgctctcctttatcctttggggctgcagggacagatggcctccagccttctttctgctcccctggcatttgtcacaacatgctatgggtcaggagaccctaagcagaaagatcgtgggaggtcagcacggcagggtacaagaggccagttcaactctgagccctcatggtatgaggcagctttagaacaatgtggaagaatcaaagaggttgaacttagactgttaaaaagcctttttcccctgaaaatttgaaagcagaaagaaatgtagagaagtagagaaaaattttcattatcccactacacaaaggttactactataaacattttggtgtattttcttcctgtattattaaaacatttttctttacagagataatgctgtaagtacaattttgtgccctgtttttcccacttaatatagaataatcatttttaattaaaaaacagcttataaatatcattattaaatgactacataatattcccttatgtggatgaatacattgcatttcatgttaccattcctctaatgttggacatttagattatttcttttctttttttccttgctattataattaatgcagtgataaacatcttagggcttatatctttgcatttcagattatttacatataataaattcctttaaatagaattaccatgtcaaagggtatgcttgtttttaagtttcttattctccaaaaaatttatattgctttacatatgcttagtttttatggagaccccacctaacctggcccaggttggggcaggggcactagtgtgaggaacagggttggggaaaacttcctggaagaagggttttaggccacatcctgaaggtgttaaatgttaacaagagtagaagcagataggatggtggggagagactgtcctagatatccaggcagagagaacagaatgtgtgaaaacccagagctgctgaagggcacacgcctgggggagctaaggccagaggccgaagggagggtggagagagatgggctgcagaggaagacagggcaggagcaagcgaggccaagtgacagaatgtagactttgtcctaacagcagtgggaaaccgtaaaggagctataaatgcaggccagtgacatgatgagatttgcattccagaaaagccactagctgctgggtggaggatggactgggtaggataggaggggaagacctcccttctgggagaccagttcagactgttgcacaaggcaggcaccaccagtgtgagtcattcctcagaatttgctaaattgataggtggaagtgcatttcacttaaattttcatttctgtaattcctgctgaggttgaatatttttaggttgatttgccaactgtatttcatcacttgtgacctcgttccttatgtcctaatggctcttggagcatgatggcatcattggtggactttagagatggtataataaggtgtataattcagctttgcattggatcccatagagacccagggaggaggtgacttgccctgggtccctgggaccaggattggggcttccaggtgcaccatcctctgctttctccagtcctctaagctacctcctagagcaggcacagttaccaggaccttggaaagcacagctcggcaagctcaaggtctactgacaagaaagagcagtaagaggatgtggagaaggtcacttttctgccattcagatttggaggaagaggttcagaatgcagcaagcccaatttaaatcaaggagttcttaacaactgggggcatctttgtttcagaagaagctcagctaaggctgttatttgccaacagattataagcatttgctagagtagaaagatgtatagagaatagagccttcagtatgaagttacctccctagacctgactcacagttcagctgcctccccaaagttaacagcatccaacttgtagatcttgcctattaatgtatttattagtttgcttgtttgatagccacagaggcttcctgaggaaattgtgggcaagggtttgccgagaatgtaccaattggaaaaacttttcttaatagctggctgctttctatgctgtggggtcttgtgcattttggttcctctcagagggtggctggctttgtatgcagtgcacatggtgccctgagttccactctaattgctatgtgcaggatagctgagtgcagcacggtggctgagtaatgaacccgcatttctctttgcagcttctctattaggaaatctcaggaacctggagcctgtgtttcattctgaaggttttcccctgttaaatctgaatgatttcagattgttaaaacactaccattgtaggcagtggccttgtcaccgtgccctgcatacacagtcatgcccttgctttggatgccgttcttatttgccttttaattttacccaaagaccagataagatgaaatatcgcatattgttatttctgatggctgtataggtcgacacatttttaaaaatcataaatcttgttacaaaataaatatgtatttttaggagaaaaattttagaaattatccccctaaacaaaacaaaacaaaacaaaacacagtaagacataattactctcactactaagatgtttgccattgttaccgtatcaggggctagcctttcaggctttgttcctttgcctaggtatatactgtttttttgtgtggtttttatttttgagacagggtttcactctgtctccctggctggatttaatgacatcatagctcactgcagccttgatccccgggctcaagtgatacccctccctcagcctcccaagtagctgagactacaggagcacaccaacatatctggctaatttcaacactgtttttgtagagacaaagtctcactatgttgcccaggctggtcttgaactcctgggcttaagcagtcctcccaccttggcctcctaaagtgctgggattggagcactttgaaaatggctaccatgcccagccaggtatacacttttaatataaaactgtacatacttttaatataaaatataaaaaatatactagtttgtgtcttgatttccccccacttaatgtgtgatgcacacttgcctactcagatttttttttcctaacctagtatctaaatgtgtctgtggattaggggcaagcctttccaggcagtgagtcaccttgtgggataatactgtcatctcaggcagggtctcatgcttcagccatgttttgggcccaagtcacattctttaaatattgtctagggtggcagatcatcatcttttgaaggatggatttgattaaaaaaataagccaatactttttcacaccccagtgttggatgctgagcaaggccatttaggcaaacttgagttgtggttgtaacaaacgagtgggttttctgggtgacttgtaggggaaggaaagaggatgagagtaaatatccatcagacaactattatggctccaccaggctaaacattttaaagccagatctagacctctgcataagtactgtaagtgtggtggtggccctcaaaatgatgcttagggggcatcagaacctcctggggagcttggtgaaaagcccatgaggccaggattgatgggggtcaagggaaagaggccccaagggaatatgaacctcatctgtaattgcagtagacactgttccacaggctcccaatacctgttcctcatttcttcttttctgacggagtctgattttgtttggattgcctatgtgcccagctatattctcttacttagtttcccttgcagctaggggtgactgtatgacacagctctggcctatgaacaagaggcaggagctcctgaggagagcacctcttcataaataagatggcaaagtcctttggccctttcgtgttcttcctgcctgctttatagactgccaggtagagcagtggtgccttgcagctggaaggatggaaaggagggaagcctcaggccaaggatggcagaggaagaagacaaaaagttcctgggtcctttatggaatccttgagtggattccataaatccactccagctctatactgcctgcttctagatttcttcttgttccctgagaaaaataacccccatctgtttaaacgactgttagttttttaattgcttgcagctgaatgcaatcataactgataaggtaatgttttaatattttacaagggggaaatgtatttacatattgtgcaattaaaaatgaaaaataatttaaatccccacagatttctgggccccacatcagatgcactgaaacagaatctttgaatctttggggatgggactcatgtagctatatttttaacaaactctacagatgattcgggtgcacaataaaatgggagaaccatttccatatttattaatagtattaactccattttatagataagaacattgaggcccaaggagttgaaacaccttaccccaatattttaaagtaagatttgcatgtagttctgtctggttccaaagtacattccccaccacatcccatgcctgctccagagaggcctggctttcccccaacaatacagccatgctacttctgaggggaacttctaaaatagaagattcaactgtttgtaaaacagttttacactgctgcccagggacaacattaccataattcatctatccccaggaaacaaagggacgtatgttttctggcatgtttgttaaaaaagagggctgggcacggtaactcatacctgtaatcccagcactttggaaggctaaggcaggaggattgcttgaggccaggagtttgagaccaacctgggcaaagtaccaagactctgtctctacaaaaaataaaaataaaataataagaataatgaaataaaaagcatgttcataagttcttggtcttgtcttctactttcaaaacaaaaattctttgaaattagctttttccatagattttctagggttaagtcacttaagaattactagaacatctcacccatgaaaggtaattatggttgttttatgagtgtggaagacatatagctggtaagtactagaatagtctcctgtgagttattagaactcacaatattcatgttgtaccaaattagccatcaagaactgatagattttatctgtagtttatcaaggcattggtcagtgatatacattcataacaattaaacacacaccagctccccttgatgagatctttgggtaaggtggccacctcgggttatattaatgtgatttgcatgggtatttggagacctgtatgataagaattattttctgacaaggaagaggatctttattgtgtgaaataggaagtcagtgtgttgagaccctcaaggggctaacagtgtcacgtgtgtaaagtttggcccaggagttataggagctttgcgttctgaacctggatctggcatgaagctactgcatgtcagactctctgatctaattccaaacagtcaggcttttagataactctgcaactccatttttgaggtcccctcatgtgtaaggtcttctgggagatgcttcattgtattgcctttcaaggagctcattttgtacgggggagggggagagaagacagatacccaagtctctattgtgccagctattgctcccccagttctcctgaggactcctgtgtgccaggccctgtttctgttctatagatgtggaaactgaggctcagagacatttagttatttggttaggatcacacagcatataagcagctgaatcagatttgagctcaattggtctgactccaaagatcttgctgccacttctgcatgactttgccttgttggtgctctgccttgcttggcagtgcagaggcatgggctgcgtggtagaatgagacctcttttgattggagaattggggaaatctgtagaagaggaaggatttaaagaggataggatgggtaaaaataggtagtaacgaaaaggtggggatgtgttcttggaaagaggagtctggtttggttgaatgtgtagttctttgtggggatgggatggggcaaaataggaaaagagaggctgcaaaagtaactgggacaaatggtaaagggcagttaataccaggctaagttacaggaagaacattttatattttatatgaaactgttgttgaagacattccatattatgctattcattattccttaatatgagtgactgcaataaatctcaaaacttactgttagggaaaaaaaatccccatcctagaggaatgccttttattctgcctttaatcagcaaggaaggactgtggaaactcattgtctttcccttcttgcccaggccaccaggaagcatgggcctaattagtgtctagttgcaataactgtcttatctctctggttcttggtaaaacatttcttcttttattccatttggttttcagccttcttgttttatttgtcttgggtataaattattactaaaattaccctaaattccttttggaagtaaatggaacatacccttcttgtaccatcacaaggaaagttaataaagggctggaacagggcagtgatgtgaccaaagcttgtttcaaaacattttcatggcatattgatgagctgattgcaagaggctgctggggaagggtattttatctcttggacaagatgtggaataagtcagacttaggagccccaagtgtcaggaggggcctgccaggtgtctgtctaccgtgagggtctctgcagtcctccttgtgcctaccaagttcaaagttaggtcctacacattcccagaccccccttttttttaaccactttcacaagagtctctgatttggtcatttcctaagaccatctggaccaattttttggtttttgttaggagaatgggctaaagtttgtatgttggtaattctctataccccactttctggagcacttaaggcaacactcggtaaaatgactgcataatgagtagtgtcagcattccagtccaacaaaaagaggctgtctcatggtctgataaccttaaggacttcaggcttggcagtctcatttctgaagaactagaatggagtgtcttttttgttttgtttttggaatggagtgtcttaaccatggtgctcttgccttcctgtgtgtgcccaggcatgggctctgtatctctgctagtggtcttcataaagacacagagacagccctcccaacagagctgtcactcactctctgtagtacctcactcatcgcagctgccttgctgttgtggaaattcatgttgtgtttaacttgtctaagtgttcataccaacagtcacagctaaagctctagggcagaagtggtatctgactgaggccagggattggtgaataacctgttgaaagtgtgtgcagaattgtgtgtgtaattctctggaaaggtcttatcagattttcaaagggaatgtattcttcctttaacatcttatccaaaaagttaactactgctctgaaaaatgacagtctatggatttcttcctgacattcttttttttgtttttgagatggagtttttgctgttgttgcccaggctggagtacaatggtgcgatctcggctcaccacaacctccgcttcccgggttcaagcgattctcctgcctcggcctcctgagtagctgggattacaggcacattccaccacgcctggctaattttgtatttttagtagagatggggtttctccacgttggtcaggctggtctggaactcccgatctcaggtgatccacctgcctcccaaagtgctgggattacaggcgtgagccaccacgcccaggctctgacattcttgaatatccctatcaacccctctcacccacccaaagcctgctgctcaaagcagctctaagcagaagagatggagaaacattcagactgggtggagcatggcccaggctgtgttgctgcccacttctgtctagatgggcagttcttgacttccccgcctgacgctgctgagcagccacagtcccgactgcattctggcttgtaccctttactatagtgccagccacagagagcagccatgcagcatttttaagtagccaaggaaaggcccgttctcacagcagtgcttggggaatcttcagacttggtattaggaaccatagcaatgagacttgttacaagcttgcaaaacaaaatgggatttttctgtgtggtccagcaaggatctagacagaaagtctgcttgattttgttttgccttgctggcttcataaacccacgtagcagaagcactttgtgaatcagaaatggaagcattgttctctgatactgaggaatgcctttcctgaatggctactgtgggtgggaatagctctaaagaaaaaaaaaatcctgagacacagacagcagctatttatgttctattctgtttgacacacattattgaatacctactgtgtgctggtaaaattcatggtgcatcagggaaggcaggtccatgaggaaccattagacaagcaataggggctggatgagcctcagcaagtgaggactgtgagatcccagaagagtgcaattaattcatctcgtgtgtgcatgctcacgcgggggccgtctggggccctcactgagaggaggcaacgagctgagtgttaaagggagggtgtcgccttctgtgttctcttttgaccctttccattatgtgagcatgcatttttaccttgtggtgattagtatgcacataatattttatcctgcctgttttcctcttagcattcctatgccgatttccacttagcgactaggctgaagtatttatcattttaaaaagccacgtagcgtttttgccttattgatgtaccctcgttgcttagccatcttctcgtttgttgggagcagcagtgtttttctcaattatgcatctttgcagaatcagctctccccttcccccttatttatttccttagggggctattgccgggtcaaagttatgaatggttttatgctgtctcctactgattttttttgttgttacagaaaatttcagacatatacaaaaggaaaaagatgactataatgaacccccacatactcatcattgagcttctacaattatcaattcatggcagttttggttcatccatagccccacacacttttatcctggattatttttcagtaaatcccagacatcatataatttcatctatgaatacctaagtatgcatttctaaaagataaggaatctttttaaaagtatagctgactgggtgtggtggttcatgcctgtaatcccaacactttgggaggcctgggtaacatagtgaaaccctggctgtaccacgaatacaaaaattagccaggtgtggtggcacatgcctgtagtcccagctactcaggaggctgagggtgggaggctcacttgagcctggaaggttgaggctgcagtgagccaagattgtgccgctgcattcccagcctgagtgactgagtgagatcctgtctcaaaaaaaaaaaaaaaaagtatagccaacagcttattatcatatctaaaataaattaatcataatccttaatatcataaaatatctagtcatccaactgacagtttaagattccctagtgttttctgtggccattctcacgaggccaaatgtttatttgctccaccatgttcttcagggaatgtttcccttgatgtatcacattgaggttgagttctttatcaagaaaggtctgcatgcaggtcctggcctcagaaagagatggagggaaagaagaagggataaagagaggcctctctccacagcctctgcagctggcctcatgtggtttgcgccacatagggtggtaggttctctctgcccgttactcacatggtaaacccagctgtgctgctttatccacataccagcttgacttggtacagtgtgctgaaaataatgtcgggcctgtccctttggactccacccccattgaagaatgcagtttcatgctgttggtttttttagtgctaaagaaactagatagatactgtgtttatttttctacagtaaaaatccgaaaagctaggaaaatgcctattccctgttggattttgatcttatttgcatgtttcccttggcaagctttgtttcgtattattcaaggtgacccacttagaactactgtttaaagtcacattgtcattaataagttacacaacctgtgtgtgataagtctgttagccctgaatattgtataaacaggaatacatgcttgtgttggggctcttcttcatatttaaatatggttacatttctttttctttttctttcttccttttttttgagacagagtccctctctgtcgcccagacaggagtgcagtggtgtgatccttgctcactgcaacctctgcctcccaggttcaagcgattcttgtgcctcaacctctcaagtagctgggattacaggcgtgtgctaccaggcccagctaatttttgtatattttgtaaagatggagtttcaccatgttggctggtcttgaactcctgagctcaagcaatccgcccgcctcggcctccaaaactgctgggattacaggtgtaatccatcacaccaggcccaaatatggttacatttaaatgtaatcttccctgtttgttctcactgttgatattcgtgacctttctatgttgatgaataggagtaatttcccagatgatctagaaccctattgtatttggctttggaatgtgaaacacgtgtacatttatgtccgcatctccccttgtgccagtccagactggctctcagtttggtcctccttaactagctgggtaccctgggtgacctcctttgggacaagggagagttagcagggaggcctggtcagaataaaatgccttttgagagatattggggttaccaggcttttatccttaagtctgtatgttcagactaagtaatgaagcttacttatgtttaggccagcttgaaagcttgtacctagcttttttttttttttttctccaagagacagagttttactctgtcccccaggctagaatacagtggtatgatcacaactcactgcggcctcgacatcctgtgctcaagtgatcctctcacctcagcctgtggagtagctgggactacaggtgcgtgccactgagccctgctaatttttaaatttttggtagagacaaggtcttgctgtgttacccaggctggttttgaattcctgggctcaagtggacttcctgccttggccttccaaagtgctgggattatgggcatgaggcaccacgactaacctatagcctatacctagctttttttttttttttttgagacagggtctcactgtgtcacccaggctagagtacagtggcaccatcatagcttactgcagcctccatctcctgggctcaagcgatcttcctacctcagcctcccaagtagctgggactataggcatgcgttaccacatctggctaatttttttttttttttttttttttggtagacacgaggtgaggtcgctatgttggccaggctggtcttgaactcctgagctcaagagatcctcccacctcagcgtggcaaagtgctgggattagaggcatgagccactgcgcctgggctatacctggctatttttgatggaagaattaaataactggcttttagttttggtcattagtttgccactttctttcttagtcttttgctgtataatatcctctttccttctttttgtaacagtaataacataaaaaatttttaaagtttgcctttaagccaaatacttcaacacactgattattttcactttttcccatttatcttccaggcattatccatatgcatgtttttttaaaaatcaattttgtgtcttttttttcttacatcattacaaaatgtttctatatggttttaagaattattacttataatggctgtattaggttgttcttgcattgccataaagaaatacctgagactaggtaatttataaaagaggtttatttggctcatggttttgcaggctgtataggaagcatagtactggcagctgcttctgaggaggcttcaggaagcttttactcatggcagaaggggaagggagagcaggcacctcacatggtgaaaacaggaacaaaaaacagagagagagagtggaggagggagtgccacacacttttaactgaccagatattgcaagaattatcacaaagacatcatcaaggcatgaaggatctgcccaccaggccctacctccagcattgggaactacaattcaacataagatttgggtggggacaaatatccaaactatatcaatagctatataatattcagtggaatcaatatactatatttaatcatcacttttttattttatatttgagaagttttaagaattttattttatttttgaggcagggtctcactctgtccctcaggctggagtgcagtgatgtgatcacggttcgctgcagcctcagtcttccgtgctgaagcaatactcctatctcagcctcttgagtagctggggactacaggcatgtaccaccatgcctggctaattttgtattttttgtagaggcaaggtttatgttgctcaggctggtctcaaactcctgggcttaagtgatcctcctgcttgagccactgcacccagctaaggattttaaataatactacattgaacacattcctagtagcttttctcccatttttcaacagctttattgagatataattcatatgccatacaattcacccatttacaatgtacaagtcagtggtttttagtatagtcacagagttttttttaaaaaacattgtattcacagcgttgttcagccattaccacaatcagttttagaacattttcatcattccgtacccattagcaatcactccccatttcccccagcccttccaaccccaggcaatcactaatctattttctgtctctatagatttgcctattctggacattttatataaatggaatcatacaatatgtagtcatttttacctttgtttttgtttttgtttgagacagagtcttgctctgttgcccattctggagtgcagtggcgcgatctcggctcactgcaacctctgctcctgggttcaagtaattctcctgcctcagcctcccgagtagctgggattacaggtgcataccaccatgcctggctaatttttgtatttttttagtggagacggggtttcaccatgttggccaggctggtctcaaactcctgaccttatgatctgcccacctcgacctcccaaagtgctgagattacaggcgacagccaccgcgcccggcctttttttttcttttttagacacaagttcttgctctgtctctcagactggagtgtctcccagcctccagttcctgggcttaagtgatcctcttgcctcccaagtatcttttttaccattttaaagatgtgtataacataaaatctacaattttaacttttttcttttgagatggggtctcaccctcttgcccaggctggagtgcagtggtgcgatcacgactcactgtagccttgacctcctagcctcaagtgatcctcctgcctcaggctctggagtaggtgaaactacagatgctcaccactgcgcccagctaattaaaaaaaaatttttttttgtagagacagggtctccctatgttgcccaggcttaaaaatacatgttaatacaagtgttgaagttttaccatgggtgtttgttgttgttgttgttgttgttgttttgttgttgttgtttgagatggagtttcactcttgtcgcccagactggaatgcagtggcgcgatctcggctcactgcaacctccacctcccgggttcaagtgattctcctgcctcagcctcccaaatagctgggattacaggcacccaccaccacgcctggctaatttttttgtatgtttagtagagaccaggatttcatcaagttggccaggctggtcttgaactcttgatctcaggcgatccgcctgccttggccttccaaagtgctgggattacaggcgtgagccactgcgcccagccaacactgtggctttaatgagcacagcaggtatgagccctgggaaacttctgggagtctttctcctggtgtggaattttgtaatcactctttgaggcctttttatagccttgttcctggtgatgcctgcggtccctggttggcctcacaggctagttggtgcctggccaacagattgcagccttgtcctggtcctctctgctcacactccaggaggcagttaaggtggccacttcactattccacctggaggctgcaataaaagcattggagacagtcaccctccccttctgcttccccgctggaattccgtctttcctgagatgcagtccacagaatacacaagttaagaattgtggttcatatttattgcgccctcactatgttccaggttccctgtttcgtgtcttatatcactaacttatttgatcttaaccacaccctgtgaggaggtacaattgttttgcccgttttatggatgaaattcagagagcgtgagaaatgtgtcctaggtcagagagagccaagactgacccccagtccccagattcaaagccatgaccttgaccaacatgctgtcctgtctccttttctcactgagcagttgtgataacctgccccctgcttcctgcctgcagtctctccactccactacagcccccatgctgttaccagagcgatctgtctcagacataaatattcttgtcactcctgttgaaaagccccatgttgcctcctgtggaaagcccagactccttagagaaaatgaaaggacactccagagctggcctcctctcaccgctccccttcaccgaggccctggccctgggaggctgtttgcatagcctatgatgttcctctctcttcaaattcctgctctttccttgtaccaggcccatttcttagctttcacagtcccctctgctcccctgttcagcctcaggtctgtgccctgtgtcctggatggctggctgcaggtctttcctggggagtgctttcagtgtaggggctccatcttacttctttccatcccagtctggcagggagaggcctcacagttgaagtttttaaattgagctgggaagtctttggataatccttcccaaggagtggcattcacatctctgggatgtgtctctgtcatcgggagaagctcaaaaaaaaggctggtgacagtgtggcacactgtgaaattctcaggcacacctcctctcttctctgagagtgctggtggtgaatggtgggcacgagggcgaggggaacagcccctgggaggcgctctggggaagaagaaattggcagcaaagcagactgcacgaagaggccgagaggaagacaggacaggtgaatcccacccccccaccccgcccccactttcccttatctgctctgctttaagcagaaactgtaacctgatcaccaggtcacagagaaactttgatcctcccagccacccccacctgtctgacattagagcacagcctgctaggctgggacaagctggccacagccccctcttccccaaagcctggcaccatcttggggcctggctggctcctgcagaggcctttcctcccccatggccaatttccatcctggccctaaattggcctcttcccccagctactctcacacactgactcacacgtaagttattccattaagtacaaagaacggcatacatcaaataccagtggctctgcttctagagagcacaccccaaatgcattttaaatctgtggatcctcctcaagggaattccagttaaaaaagaacttgggtcagcagcctcgggcctgtgtggctaacaagcttctgttttctctgttgtttggctggcctgaagggttcctttgtttggggagtgggaggatgtggtgtcctaatgaggccagggtgtggaattggggctcacacagagctgtcctttagaactgagctctccagacaggagaataagttggggagtttgagagtttattggtctttaaagaaaacagaaggtttcaaagagaggaaaacaaaatgcagtgtggtattctggatcggatcatgagcagaaaaagggcattattggaaaaactggagaaatccaaataacatctggagttcagttaatagtactataccaatgttaactttttagttttggcctgtgtgcagtggttatgtaagatgtgaactgcctgcaacggtggctcacacctgtaatcccagcactttgaaggctgaggcgggtggatcacctgaggtcaggagtttgagaccagcctggccaacatggtgaaacccccgtctctactaaaaatacaaaaattagctgggcatggtggcgggcgcctgtaatcccagctactcaggagactgaggcaggagaattgcttgaactcaggaggcagaggtttcagtgagccgagatcgcaccactgcactccagcctgggcaacagggtgatactccgtctcaagaaaaagaaaaaaagccgggcgcagtggctcactcctgtaatcccagaactttgggaggccaaggcgggtggatcacgaggtcaggagttcgagaccagcctggccaacattgtgaaaccccgtctctactaaaaatacacaaattagctggtgtggtgacagacacatgtagtcccagctgcttgggagactgaggctggagaattgcttgaacccgggagccggcggttgtggtgagctgagattgtaccactgcactccagcctgggcaacagagcgagactccatctcaaaaaaaaaaaaaaaaaaaaaaatattgaacattagcggaaacggtgagaagagcaaatgagaactctgttctatctttgcaacttttcagtaaatataaaattattccaaaataaaagatgtattaattaaaaaaaaaaagaacgagagaataaagtgacccagcatctaatttaacttgacactttcaccagcactctcttttacacttaagacttcacctaaaaatcaggagggtctttagacttcacctaaaaatcaggagggtgggctgcatccaatactctggaccgtctattgtggaggccagggtcttctttgcctctgtgaccctctacctgaggatggatcagggtccaaggccaggcttaccaggaagacctgggtcatgtggttggcagtattgctacctcctctctgcacactgtggggctagtcaccccaccaggcttcattttcttcctattagagagagagaaccttcctggcggctggggcgtgggatggtagggttaaatgaggtaatgtctgtcaagaacctggctcaaaccaaataaacaggttttcattctctcttctgtttctccatttttttggtgaaaagaatgagagccatttccttgaagacttgagaccagtggttcaatggtagctttaagggcaagaaactgcccatagggaacttgcaacaacaccgtggcccctcctcccccatgccccacttcctggggtccaggaaatgtggacttatggggaatctttttactagatggtctctaagacctcttggagttttaatgcttggattcttaaggaaattgtggtgtgcctgctcctttaccctacaggtggggcaagccaagtttgggggcttccttctggaagcatggaggtcttcctggctcagtaacccagaaatccagaaagctagagctcccagggttttgaatctgatgggtgtagcttgtggatggctgtttacctgtaggtggcagtggtgacacgggaatgggagaggaggggggtgcaaggggagggcactggcagagctcctttcagaagagctgtaataaagttagaagtaacagcaaggaaaggtcctctgtattagaggctctgtcaggtgttttctgtattatttagtctcctctaacagccactgtgtgagagagtgctgttattgcagcattttgcagcagtccaaaaggcttggagaggtcaagttattgcctgtagtcacacagtaattggcagaactagaactcaccaaaatctgagttcacactccctgttctagactccattataatgcacatttctcctgcttctaagtctgaagggagaaccggggacagctgggaaccgagctctcatctcaccagactgcccagtgcctgtcacctgggggcctcagaagggtttataatcatcattttacttataaagggccctcatcagcataaagccaggccttcttgacatgaagatgtcctgcctccaagcagcttccagtttaggttggggttgggggccaagaagatacttaacggctcattaagccggtaagatttgaaaaagttctcagaacattagaatggtcttgaaggctcagtccttgtgtgaactgtactatcaggtgctggagcccatcagagggcctctcttgtgggcggcagcaaagaaggttctggagaggacgttggatgggagctagatatgggcagataggctggagagaaggctttccagacagaagtctgaggtgactttctcagggcttgcaaagacctgcagatcctgttatggttcctgttttcaccctcttgcaattttttatggaataaggactcaaatgggtcttctcttcagctttgtttgctctcatggtgtatgactgtgttttgtaaaaatatatataggcgcaacgatgctgcctttcaccacttctattcaacatggtattggaaattgtagccagagcagttagggaagaaaaagaaataaaaggcatctcaatgggaaaggaaggagtaaaattatctctgttccctgatgacatgactttacatgtagaaaaccttgaagataccacaaaacaaaaaaaaaaagaaaaactgctagagcgaataacataaatttaccaaagctgcaggatacaaaatcaacattcaaaaatcagttgtgtttctgttaatatacattaacaatgaacaatctgaaaagaaaagaaaacaattccatttacactagcctctaaaaaaataaaatacctaggaattaaccaaggcagcaaaaaattgtgcaccgaaaactataaaacgttgctgaaagaaattaaagaagaaagaagacataaatatatggaaaaacatcctgtgttcatagatgggaagacagtttttttttaaggcagcctcattgtgttgcccaggttggagtgcagtggctcaattacggctcagtgcagccttgacctcccgggctcaagtcatcctcccaccttagcctcctgagtagatgaaatgacaggtgtaagccaccactcctggctaatttttaaattttttgtagggatggggtctccttatgttgcccaggctgttcttaaactcctgagctcaagcagtcttcccaccttggcctcccaaagtgatgggatttacaggcatgagctggcctgggaagctaatatttttaagatgacaacactacccaaagtgatctacagatgtaatgaaatcccagttaaaattgcaatgaagccaggcatggtggcatgcacatgtattcccagctacttggaaggctaagatgggaggattgcttgagcccaggagtttgagtccagactgggcaacatagcaagaccctgtctctgaaaaaaaaaaaaaaaaaaaaaaaaaaaaaagaccaatggtatttttttcagaaatagaaaaatccatcctaaaattcacatgaaatctcaagggaccccaaatagccaaacaacctttaatttttatttatttttatttatttttttgagatggggtcttgctctgtcgcccaggctggagtgcagtgatgtgattttggctcattttgcaacctctgcctcccaggttcgagtgattctcctggctcagcctcccaagcacctgggacaacaggtgtgcgccaccacgcccagctaattttttaaattttttaatttttttagatggagtttcactctgtctcccaggctggagtgcagtggcgtgatctcggctcattgcaacctctgcctgctgagttcaagtgactctcctgcctcagcctccggagtagctgggactataggtgtgtgcccctgcgcccagctaatttatgtatttttagtagagatggggtttcaccatgttggttggccaggatggtctcaatctcttgacctcgtgatccacctgcctcggcctcccaaaatgctgggattacaggtgtgagccactgtgcctggctaatttttgtatttttagtagagacagggtttcactgtgttgaccagactggtgtcaaactcctaacctcatgagatccactcacctcggcctcccaaagtatcgggattacaggcgtgagccactgcgcctggccctaaacaacctttaaaaagaacaaagttggaggactcacacttcctgatttcaaaacttacttcaaaactataataatcacaacatcatggtattggaataaggaaagacacatggaccaatggaataaagtagagaactcagaaataaactctcccgtatatggtcaattgattttcagcaagggtgccaaaagtatttagaggggaaaggacagtcttttcaacaaatggtgctgggaaaactgaatatccacatgcaaaagagtgaagtcggaccattatcttataccatatgcaaaaatgaaccccaaacagaccaaagacctaaacataagagcgaagggaaaactataaaaatcttaaaataggccgggcgcggtgattcatgcctgtaatcccagcactttgggaggccaaggcaggcagatcacgaggtcaggagatcgagaccatcctggctaacacagtgaaaccccgtctctactaaaaatacaaaaaattagcctggcatagtggtgggcgcctgtagtctcagctactcaggaggctgaggcaggagaagggcgtgaacccaggaggtagagcttgcagtgagctgagatcgcgccactgcactccagcctgggtgacagcgcaagactccatctcaaaaaaaaaaaaaaaaatcttaaaaaggggaaatcatgacattggatttagcaaagatttctgagatatggtaccaaaaccacaggcaacaaaagaaaaaatagataaatgggacaatcaaaatttaaaacttttgtgcattaaaagatacaatcaagagagtgaaaagacaaccataaaataggcgggattaatattcagaatatataaagaactcttacagcttaacaaccaaaaaaaaaaaaaaaaacctactcagtttaaaaatggagccaagcattgtggctcatgcctgtgatcctagtactttggggggccaaggcaagaggatcacttgaggccaggcgttcaagatcagcctgggtaacatagcaagaccccatctctacataaatttttttaaagaaaattatctagttgtggtggtgcatccctgaagtcccagctacttgggaggctgaggtgggaggattgcttgagaccaggatttcaaggttgcaatgagctatgctgctatgattgggccactgcactccattctaggtgacaaagtgagatcctgtctcttaaaaaaaaggggtgaggggccaaaaaaattgaatagatatgtctccaaagaagatatacaaatggccaaaaagcacatgaaaaaatgctcaacatcagtagtcattagagaaatacaaaacaaaaccacactgggataccacttcacacctggtaagccaggatcccatcattgaattggtggtaccaatatttgatcctagttctgtctctaaagcctggatgtttgcatgatatagtctcacctgctagcaaagcctgagtttggatctgaagttaatatcttggaggaattctgaaactaccccatcctaactctcaattcatgaaaggataccatcaccactattttaataaaagtttaatacaatccacacttcgccgatactcagataataacatagaagacctctgtacaggctggaagtatccttgttttactggatgcagctatggtgaagtgacacttgttttttacgtaacaaactagatagaactcacacatccaaacaaaagctatactttacaagcagtgacagcacactccaaaaatatagctgttgctcaaaacatttgtgcaacagtcttctgtctgcattaaaaagcctcattgttttatttactgctctttttaaatttttttttacctaaaaaagatatatccctaaccttttctctttattcatcacacttggcactcaaagactcaaagacttgaccacccaggtgcctccaagcccctgctctgagaaagcaaccccacccccaaatagtaagaatctgacttcacatgaatgcaatacacagccagaggactgggcaggggctaggaggctcttgagatttggagcaatcttaaccaaagtcagtcctcagatggcaccaggctggcagttacagaagcagtatttgatacttgtctacaagatggggaaagtggaggaggagaggaagggatgagaatgcatgtcagcaatggttaagagccagataggccccagagatgccataccccctctctgcccttttcatgcatgtgggaaagagagtaaaagtcataaagccagcaaggagcagacctgggcctaacagggaaatcagagccccccaagggagggcaggcaggcctaggaagaatgggggtggtggtaggcacatctgtttagagaagaaaagactgagggcagaggttccaggaaggttaagggggaggacacaatgtagccactgagacagcagtgtgccctgtcaccctatggcttatccagacacagaatgagccccaggtgtgctgggagcctgcagcagtgaaatggtgcctgcctcctgcccctgctcttcctgcagctgtctctgaacacccctcctctgtccacgcccagagggaatgactcaccacctgggtcacacacagcaggggcatgtctgcagccataaatccagcagcctcctcaagaggagacttatcctgatggaagcagctttgcctgcgggcctggacttgctactcttttgagccaggaaggggagaggccagctggctagggggtagtagtctctccccttcacagaactcaagctgtggcacagactctcatggagaagaaagtacagagattgcactttggtagggctacaagggatacagtcttgggaggcttaatagaggaaatattaaatcaatgaaacctcgtttccaagttcggtttagcagcagaatccattaaccttatattcaccctttcctttcctcttatgatactggggaagggttcaaaggcatgataacttatcctcagggtcagtgcattctattcaattactgggatttgagttttcaagctaaaagatatatacccattttgattataaagaaccaacccaaaaagaatgcttctttcttttcattttgcagaaaatgccacacaaacacaaccatgggtatttagctctactgaaacagatgagggaagtaaggctgacagaggagctcaaatcagttctgatttttctcttcataaaagaatttccattctgcagcattcattcaggaagcactcatgaagagcctaccaggtgccggccctggcctggggctgggcttagagccggggcaggatggcccggcatctgctccatggagctcacagcccagcctaggctggcaactccagtctgccccagtttccagttctgtccattccccttgcagctcagcatggatgaagctttgaaatccagctctccctctccctctccctctcccgtctccccacggtctcccccgtctccccacggtctccctctccctctcccgtctccccacggtctccctctccctctgtttccacggtctccctctcatgccgagccgaagctggactgtactgctgccatctcggctcactgcaacctccctgcctgattctcctgcctcagcctgccgagtgcctgcgattgcaggcacccgctgccacgcctgactggttttcgtattttttttggtggagacggggtttcgctgtgttggcctggccggtctccagctcctaaccgcgagcgatccgccagcctcggcctcccgaggtgccgggattgcagacggagtctcgttcactcagtgctcagtggtgccccggctggagtgcagtggcatgatctcggctcgctacaacctccaactcccagccgcctgccttggcctcccaaagtgccgagattgcagcctctgcccggccgccaccccgtctgggaagtgaggagcgtctctgcctggccgcccatcgtctgggatgtgaggagcccctctgcctggctgcccagtctgggaagtgaggagcgtctccgtccggccgccatcccacctaggaagtgaggagcgcctcttcccggccgccatcccatctaggaagtgaagagcgtctctgcccggccgcccatcgtctgagatgtggggagcgcctctgccccgccgccccgtctgggatgtgaggagcgcctctgccaggccgtgaccccgtctgggaggtgaggagtgtctctgcccggccaccccgtctgagaagtgaggagaccctctgcctggcaaccgccccgtctgagaagtgaggagcccctctgcccagcagccgccccgtctgagaagtgaggagcctctccgcccggcagccaccccgtctgggaagtgaggagcgtctccgcccggcagccaccccgtccgggagggaggtgggggggtcagccccccgcccggccagccgccccgtccgggaggtgaggggcgcctctgcccagccgcccctactgggaagtgaggagcccctctgcccggccaccaccccgtctgggaggtgtgcccagcggctcattgagaaccggccatgatgacagtggcggttttgtggaatagaaaggcgggaaaggtggggaaaagattgagaaatcggatggttgccgtgtctgtgtagaaagaagtagacatgggagacttttcattttgttctgtactaagaaaaattcttctgccttgggatcctgttgatctgtgaccttacccccaaccctgtgctctctgaaacatgtgctgtgtccactcagggttaaatggattaagggcggtgcaagatgtgctttgttaaacagatgcttgaaggcagcatgctcgttaagagtcgtcaccactccctaatctcaagtacccagggacacaaacactgcggaaggccgcagggtcctctgcctaggaaaaccagagacctttgttcacttgtttatctgctgaccttccctccactattgtcctatgaccctgccaaatccccctctgtgagaaacacccaagaatgatcaataaaaaataaaaaaattaaaaaaaaaaaagaatttccagctaatcaagagcaaagttggatctgattgcctctggaactaaggccactcaatgtgggctccctcactcagtcctgtccccaggccagaggaaagcaaagttcagtctcatttattttgtcacctaaatcgtcaaaacctaaaataaaacctggtgcaacagcagaaacacaagtgttctagggaacagtggggcaagtccttcccaccagccagccctctggacggataattgtaaagtgctgacctctctggtgatatgctaatggccaaggactgggctggggaagaggctgggtagggtaggccaggctgggctggactggacagggcagggcaggcctgagctcgggtaatcagatacggctcccattaaatcttcagtgcaagagcagcatagcatcctgatgccgttgccatggcattttctctcgcctggggtaggacccaggccaggatgccctgaagccttgacgctgacagcagtgatagtgctggctctgagcatggtttttctgcccacccaccctcctatgttctctgaaacctaaggcagccctgtttggaggagcctcgcaatccagcggcttggctttttggctgccgctttctacactttgatgttaaatatagtgacttcagaagcagccaacaccagaaggcaaaagaggactggttttagcattttgcattcagcaacatccttttggtgagaatggagaagaaaacagccaaatgatctacctccccaaccatcaagagtgttggggctgggcacagtggctcacgcctgtaatcccagcactttgggaggctgaggtgggtggagcacctgaggtcaggagttcgagaccagtctggccaacgtgccgaaacccatctctactacaaatacaaaaattagccaggcatggtggcacgtgcctgtaatcccagctactcgggaggctgagacaggagaattgcttgaacccaggaggtaaaggttgcagtgagccgagatcacaccattgcgctccagcctgcacaatggagtgagactctgtctcacataaaaataataataataataatagtaataatcactgaatcccaccccataccattcaaagtagaacctctggggcatgaggctcaggtattggtgctctctagaagctccccaggtggttctcgtgtacagccagggctgagatccataacttagaggaagggttgctaatgcagtcattcatctgatgtaaatgcattgcactactgccaagtgctgggcactggggacccagtggaaggcaagacagacctagtccctgccctcacagagctcacatcccagagggggaagggagtcaagtgaccctggctgtagtcctggctctgccactgacgatcctgagctcctggacctttcccttttcttctgcgggccccgggtttcccgtcaaaggaggctacagacccaaatgatctctgatccccaccctgctactccctgacccagcagtccattgacctatgtataatttttctgtcttttttggtggtggtttttaaaatacacataacattaaatttatcattttaaccattcaacaaaaagttttttaagagacagggtcttactctgttgcctaggctggaatgcagtggctcaatcatatctcactgcagcctcaaactcctggacttaagcaatcttcctgcctcagcctcattagtagttaggaccacaggcacaagccactatgcccagctaatttttaaattttttgtagaaacaatgtcttgctatgttgcccaagctgttgtcaaatcctggattcaagtaaccctcctgcctcagcctcccaaagttctgagattacaggtgtgagccattttgcctggcccattttaaccattttaaagtatacagttcagtggcattaagtatgttcacattgtgtgcaaccatcaacaaccatctccagaactctttcattttccccaaactgaaattctgtgttcattaaacaataactccccattcccccacccccacaccccccagcagcctctggcaaccaccattctactttctgtctttaaatttgactattctaggtacctgattgtaagtagaatcatctagtatttgtcttggtgaaaggcttatttcacttagcacaaggccctcaaggttcagccatattgtgcatgcaataggatttccttcctttttaaggctgaataataatccattatatgtatatccatttggcttatccattctttaattgatggacacaggctgtttacaccttttggctcttgtgactattgctgctatgaacatgactctgcaaatatctcctcaaggccctgctttcagttcttttgggtatatactcagaagtaaaattgctagatcatagggtaatgctatgttttttgtttgtttgtttgtttttgtttttgagacggagtctggctctgtcgcccgggttggaatgcagtgacatgaacttggctcactgcaagctccgcctcctgggtttacgccattctcctgcctcagcctcctgagtagctggaacgacaggtgcccaccaccacacctggctaattttttgtatttttagtagagacggggtttcaccatgttagccagatggtctcgatctcctgacctggtgatccatcctccttggcctcccaaagtgctgggattacagacgtgagccaccgcgcctggctgggtaattctgtgttttaactaccgtcctgttttccatagcagctatatcattttacatttccatcaaaagtgtaaaggggttccaatttgtctatatccttgccaacacttgttattttctatttttttgatagtagccatcctaatgggtgtgaggtgatatttcattgtgtttttgacttgcacttccctaatgcttagtgatgttgaacctcttttcacatacttgttagtcatttatatatcttctttggagaaatgtctattgaagtcctttcccattttttaattggatagtttgggtttttttgttattaagctataggagttctttacgtagtctggatattaaccccttatcatatatataattttgcaaatattttcttcctctgcaggttcactgtgttgtgtcctttgatgcctggaagtttttattttgatgtagttcaaaatttttcttttgttgcctgtgcttttggtgtcatatccatgagatgattgccaaatctagtgtcatgaagttttttcactatgttttcttctaagagttttttagtttgagctcttacatttatgtctttgatccatttggagtaaatttttgtatatggtgtaagataaagggtccaagttcattcttttgcatgtggcaatccaattttcacagcaccatttgttgaaaatactgtcctttcctcattgagtggtcagaaagtcattttgtggatgagataaaataatgtacgtgaaacacccaacaccacacctacagtggcttgataaccaatggtcctttctttctcccccttatctgaaatgtagtttttaactactgcaattgatttttaataatcccaatagcaaatacctgtatagtactgactgtgtgctaggctctgttctaagtgtttcatgtatatcaacccatttaattttcataacaaatatatcaggtaagtgctgttgttttcactagctttggcacctagaagttaagtaatttacccaagaccacacaactagtaagtagtggagcctgtatttgaacctaggtagtttggctccagactctacgggttcataaacctaatatcctcatgtttggggtgatttttgatggcttaggcctgtcataagcttttcagtctagagtttggtgaatgaagaacctcgttataacatcagccctcaggccaggacctttcccgggtgttctcttgtgataatagcactcctagaatggctctgttggctcagcccatctgcttgggagaagaatgtggtggttctggtctcttcccatttcctgccaaggcccacttattccaggagaaatgtaaacccattttctctctgatttcacagaaaaggcaacagatggctccctgcaaagtgaggattggacgttgaatatggagatctgtgacatcatcaatgagacggaggaagggtacgtgtgcccccctctcctgggaagcctctctgagcttttaggggccactcaaagcttgtcagggcctaagggtggcaggttttattttttgttttgttcctagtatgtttggtttggcatcgaataagctgacactctgaattatctgtcctttttgtcttcatccctcccccacttgcccaatggcagtgcttggaggtagaacagggatgacctcctttaatcacctgcttttaatcacaagtggaaatgaagctgcttgattacttggttcccagtggccattagtctctgcagcccaagtgtcacctcgtccctcccctcctccctggcctctgcctctccttcacagcctgtctctgccctggtttgccaggagtcagagagcaccaccgtgtccatggagggaggtccagggcatggggcagacacggccgggagtgggaaagcggcatgagtggacttagaacacgttgcccctcctgcattcctgcactgctggatccgttcctgttgttatttcctgaatcctcttttgttttacagctgcactctatttgtacttcttccaaactggtctgtatttagccctctgtccataccactaacacttactttactgtagccatgccctcttaaaccattttcaggagtggcaaggagagcagctgggactcaggcatccctgggctggcatctcagcactgtcactctagccttgccatgtgtgaactggggaccagcctctcaagcttggtcctgctttcatgcaacaaatatttctcgaatgactaccttgtgccaggccctattgtaaatactgaggacacagcagtgaacaagatagattccttccccttggggagcggccagtctagagtagtagggaggcaggccataaacaagataattaaacatataacctggtcagatgaggacaagactgtggaagggagatggggagagaggaggctgggaattagcaatgttaaatagagtgatcaagaaaagtcttggctgggctcggtgggtcacatctgtaatcctagcaccttgggaggccaaggtgggccagttgcttgagcccaggaattcgagaccagcctgggcaacacggttgaatcttgtctttacaaaaaatacaaaagttagccaggcgtggtggtgcacacctgtagtcccaactacttgggaggctgaggtgggaggatcacttgagcccaggaggtcgaggctgcagtgagccatgagcatgccactgtactccagttttggtgacagagaaaaaccctgtctcaaaaaaaaaaaaaatgaaaagagaagacaaaacaacagaaaagtctcatttagaaggtgacattgaacaaagacttgaaggagatgagggagtagggggtgaggattatacaagggaagaactgtcaaggctcatggaacagcaaacccagaagtcctgggacagagggtgtctgatgtgtttgaggaatagcaaggtggctaatgggcccggagcagagtggtcaaagaagagagtacctggagaggaagttaccgacatactggggacccagataacacagggccatgtagaaccagagcaactctggcttcaacctttttggagattcaagcagaggagtggtgtggtcccactcttattggaaagagatcactcagtctactgtgttcagagtggcctgactgggggcaggccaaggacaatgcagaaaacccagcgatggcctggcatagtggcgtgcacctgcaatcccagcactgtacgaggctgaggcaggaagattgcttacgcctaggagttcgaggctgtgatgaaccaggacggtgtcactgcattctagcctgggcgacagagtaagaccctgtctctaaaaagaaaaaagaagaaagaaaacccagtgaggaggttatcacagtaatactggtgtgagatgatgattagaagtgatgggattctgaatgtgttagatggtagagccaatggaattggctgacataagacaggaatgaagagttaagggaaattgcaaggtttggggcctgaacaaccatgggatggagctgctgtttcctgaggtggagcaggctggggagcagagatcagcagtagatctttgctgccagccaggctcctggaagatgtgacagggaactgcacagggaacttgagttgggggcagtggcctgcactggatgaaaacgtgggagtctttggtgaaaggtggcatattttcaccagctaaatataggtgatcagcttggtgcctggtacacagacgtgactcacaaatagttgttagggactacacatctctaatcccatcgtcactgggctccgagtggctaccttcctcacgtcctcctaacatgccactcattcacttgtttgtccagtcatctggccatgtttactgacccccaggggtggaggtatagcagctacgggatgccaaggtgaatgttccagcctgcccttgaacgctcacctggcaggactggcaagggctgtggccaaggcctgtccctgatgccatggtcccagagggaaaggtgggtatcaatgcttcctggaggggctgtcttccaggatggcaggagaaatgtgtcccgtagccaagggtggcatcaaaagggccagtgtgtcaagggatacaagctgtctaggatagacagggtgacattgggggagcgggagggtctggaatccggctggaaaggtagtcaaggtcaggtgctgcattctctggtgtctgcactttaccctagaggtggacctctgcttcgaccccttccctcctaccccttcctgctgcacaacgaccaagttgctcccttgctaacaagccttcaggggtttcgcaggcacttaggttaaaaaccccaaccaggcccctcatgaggagccccagacccctcggcagctccactttgagctcttcaaccctgctgatctttcagctccttgaattttccatattcctgggcccagcttgaaattctctacagatttgagcaatatacaaatatgttggcaactcttattttccagtgaattgctcaaatatctctatggcttgagggcaggaagcccaggaaccccaggagcttccttattctgaaggggccaatgccttctttttcaaatcctcaattcccagaaggctggtcacacacatctttctcttcaagtggctaaagctcctgttgctacctttttgagtgagagcacctcagtgattcctgagaatgttttcttgttgcctctgctgtgaggtgtctcaaaatctcttcctagcaaggtgcagtggctcatgcctgtagtcccacctattcagaaggctgaggcaggaggattgcttgagcctaggtgtttgagaccagcctaggaaatgtagtgagaccccatatcttaaaaataataataataataataatctcttcctgagtgaaagaaactcccacaagttggactgacagtagggcaccccacccacccctttgtgccctccctgaaggcctctgacctgctgtcccttctgttctcgtcacctctttcactaagtagatcccgtcattcactggatctctcagtttgaatctcatttccctaaccccttcccctcctgatttggacaagtcctctgttatatgatttcataacccgtgttgtactgatgctcatcacagtttaaacttacagatctgtgggacggttgttagtgtctgtcttgccctgcaacccccgcaaggctgtgatctccatgaggacaggatttccatctgttttacccaacattttttttttttttttttgagatggagtctcgctctgtcgcccaggctggagtgcagtggcgcgatctcggctcactgcaagctccgcctcccgggttcatgccattctcctgcctcagcctcctgagtagctgggactacaggcgcccgccaccacgcccagctaattttttttgtatttttagtagagacggagtttcaccatggtctcgatccccttacctcgtgatccgcccgcctcagcctcccaaagtgctgggattacaggcgtgagccaccgcgcccagccaattactcaacattttgtccctagcacctagcacaatgcatttgattagctgttaataaatatttgttaaataagtgaataaatgaatgaagtctctaaggtactcacagtctgatgaggaatgcaggcatataaacatatgcataacgagtgctgggtggggggcagggagagagagagaagctatatatagctacggagactagtgcagtggcagtggtcagccttgggacttttggcagcaaagccttcttggaggaagtgacaccagactggagtcttacagagtgccagggtatcagccagatgaggcaggtggatgaaggggaggaaggtggacaccacaggctggagcaattctaggtcaccactcgcttattgtgcgagcctgtgtgagttacttcatctccctgtgtctgtgtcccatttcctcacttataaaatggggttgccaataatacctatctcatagggttgttacaaggattaaaggagtaaatatatatgatgtatctggctacataactgtatcttcatatccatactatatctatgtggatgtactatttcactttaaagatttccattgcccatgacttttgtcatcactttcatttgggtgtcagttatctgcccagtcttggtgactatcttggtggattcactgcccttaccctgtctgctgtctgtgagcacttggcatgtgccacgccctgcaggccctgtgtccagccctgcagtgcatcatcacaagcagcgccccctacccccaacagttctatatggtagtgacagcctgtttcagtgttaaggaaactgaggctgagtagtttggtcacttgccaaaggccttgcagcacagcttggaagggcacatgcaggatgcaagcacaggctcacctggccgcagccactgaagtgctgcctgcacttcttgtatttgtgcaatactttaccaatgggaggctgtggtcctggtgggtgcagattggtaaactgcccgaaaggcctctccttgggctttccctaatgtccagagctgaggtcaccatcagcctgaggaatgctgatgcctaaggccttgatgacagtccttcaggcattaaccaggagtggctgactgaataacctacctgggactgtttttatttatttatttatttttgaggtggagttttgctcttgtcgcccaggctggagtgcaatggtgtgatctcagctcaccacaaccaccgcctcccaggctcaagcaattctcctgcctcagcctcctgagtagctgggattataggtgtgtaccaccacgcccggctaattttgtatttttagtagagacagggtttcaccatgttggccaggctggtcttgaactcctgacctcccacctgccttgggcttctaaagtgctgggattacaggcgtgagccagagcacccagctgggactgttttagactctgttttccaggcctcacctcagacctacacaatcaaggcacagcttgtggatttgggaatggcactacaggtgactctgatgtgcagctctcatgaggaacccctgacctgggtcatttacatggccatctctggaccctcctcagctcatagaatctttgtgttctatcttctaagctggagagggcacagaggaggaactgaagacatgcaatagagcaagataataatggggagggcatgttcagggtgacagaagaggggcagccatgtcctccttgggggtgatgaggagaaagcttttccagagagtagtcctgaagctgaaggacaaagatacaaaggctgtggctggagggatgacaggaggcttgtttggggatcagggaagagttcttataagtctagggtccagggagactttgaggagcctgatcatggcccagaggccaaatcacgaggctgtgagcactgcctgaggagcctgacctttcccctgaaagctgctagggcttgatgccatctcaacacaggccactgattcttcctgatcctttctttctgctccatcttggctcttgacacatgcttctgtctcttctcctggtttccaactccacactatctaatctgctgcagcttcttgaaactttgtgtttcctttgacatgactttgatcctcctctctgaagcttttcccccggggagagagataaatacttgcttttgtgctcacccatcactctcggccagtacttcccagagcctatggatgaattttcattttaaacctcatccaggaagctgctgactgtctgatttcccaccccgtggcccccacaccaggagagccctgagtgtgctggtcctctgccagccagaaatgattgcagccctcaggcgctcttcctattttcctgttccatggaagttcaagaggacagaagagaggactgaggggtgtggcagctgtgggtcagggacagcagtggtttggcagagccttggagagaggaaatcagtccatgctgttggccagtagccactgaatttcatcagctctcatgccacaaacagccttcaaagcagagagccggttaagtcccatatttgcagaaatcagcatccccttttggaaatggcagccgtactgcagacatacttggccttgggcccagtccccatggagccttgtgtctgtctcatcagccctttgacccaggggccaagaattcctacagggcagccatatgtcaagctgggaatgggaaacaggtgattcagggtgttttaaaattttcttctagtagccttgctccttaaactttttttctttctttctctcttttttttttttttttttgagatggagtcttactctgtcacccaggctggagtgcagtggcataatctcagctcactgcaaccttcacatctcaggttcaagcaattctcttgcctcagcctccagagtacctgggactacaggcacacatcaccatgcccagctaatttttttgtatttttagtagagacagggtttcaccatgttggccaggctggtcttgaactcctgacctcaagtgatccacccatctcggcctcccaaagtcctgggattacaggaatgagccataatgctggacacactttctcttttttatttttatggagatgaagtttcactcttgtcgcccaggctggagtacaatggcgtgatctcagctcactgcaacctccgtctcccaggttcaagcgattctcctgcctcagcctcccgagcagctaggattacaggcagctgccaccacacccagctaatttttgtatatttcagtaaagacggggtttcaccatgttggccaggctggtctcaaactcctgtcctcaggttatccacctgccttggtctcccaaagtgctgggattacagactgtgagccaccatgcccggcccagtttctcttaaattaagctgattagcagagcatcaaccctttcccctcctcaacttcctcatacacatttgaaggggccttttcatttggtagagtataaatgttttaaaactgtaggaataggagatccctgacttaacaaacgtgcaagctgggaaagaccagtatattgacacatagattagtggaaggctggaacccatgtgtgattgcaaagcgctggcccacagccggactgagggctccccagagcatagggtgatgggtcaggtcagcacaggggctttgtgccaggggcagctgctaggcccacagctttgttgaatcctgagttagaataaattaaattacatgttagacacaagacctacatgtaatatgtatacttagagggctgcctgggaatcctgactctaaggtataagagtaattaaggaagaactcactccaacttccaaacagctccactccaacttttggacagagcccatttgtgaactgagtactgtctataattctgcaagattttatctgggaatccacctcagatctgtcacctaaaaacacaaaacttgttgggttttaaggagactcacttaagctttctctgggaaaaggagttccatggaattcaggaagagccgggcatccagggctcacaaggacctggcacgctctcttctgtgtctctcatatggtttctctggaaaaactctcttctatgtacccacacaccagtgggttagttagggttttgaataaataatacttgcatgtgatacagaattcaagaggtctgcaaaaaggcagtccagtgaaaaacctccctccgcctttggttcccttccttaggggcagccacagttaccaggttgttatagctctttctagagagtctcttccctacgctggcacctgtgctatgtatgtttgctttccttctataactcaactaatagcaagctttgtacactgttatgcaaagaactttatgcacatgtctttgagtttggtgtatattggtgcatgagtttctttattcttttttgcagctgcatagtattccattgtgtcaatgatttaatttaacctgttgtgtattgatggacattcagtttgttcccagtcttttacatttacaaacatgctgcagccagcaaatagtcttgcatatatactagttcacatatctgtaggatcgtgtcctcaagtgggattgtaagtatctttatatgtctgttcttttttccaggccaaaggatgccattcgagccctgaagaagcggctcaacgggaaccggaactacagagaggtgatgctggcattaacagtgagtgctattctccttgaggagagaagtcatctggggaactccttgctcctggccttgcccccctcacagggccttccctctgcccacttagcacaacctctgaatggcttggtgcctgggccactggagtccagcaaagccttctggtattgcctttgggttttcctgtcctctgaaacagggagtggtgagcttcaatttggtaaatgtatacgagcagaagataaggtgtgtgcagtgctgtcaggtacagaagcccagagcagaggagctaaaggttttgggtgggtcccttttctgtcaccagcctgctctgagactgagaccaactccttctctagatatcagtttcctctttgtaaaaatgttggccaggcgcggtgactcacacctgtaatcccagcactttgggaggctgaagcgggaggatctcaaggtcaggagttcaagaccagcctggccaacatagtgaaacccagtctctactaaaaatacaaaaattagccaggcatggtggcaggtgcctgtagtcccagctactcaggaggctgaggcaggagaattgcttgaacccgggaggtggaggttgccgtgagctgagatcgcaccactgcactccagcttgggcaacagagtgagacttcgtctcaaaaaaaaaaaaaaaaaaaaagttaacttccacctattgagtacctgcccctgcctgggactgtgctgaactttttggacattaatgaatatgtttacaaccaccctccaaaagagattttactatcctcccccgtacagatgatgaaactgaggctcagagaggtctggaggtttacccagccttcacagctagtgaggtgtactgagctgtggattgccatcataaagtggtcttttgcatggggtaaaaactgaaaatagctacaaagactcttgaaaaagtcagccaagtgatttttttcaggaaggaacagaccagatttttgcccttaccaaagctgtcagagaatttaaaaagacgacttcaggtgttatttctgtcttgagaactaacagtttttcagatgtggcaaaatctgggccacagtgagttcttaaaatagaaactgtaacaggtcaccaggtcaacttctctggggctttgaaatagtaggttatttatccaaaacaaccatgtttccttttaaagcagagaacctgtttggattttttgcccaagcgaaaccccaaaacttattaagagagttctgccagggaattgggatttgaataataaaggagaaaagactggttgagaaatagggagttgaagcttttattttattttttctcagaatttgagccacagcattcactaaaccaggagtgatgcccaaaacgagtggctttcaataactcatatcacgagggaatgagctctaatatatcagggaattttactgctatctaaaacatctccatttacacacccaacttcatggtaatcgtgttggatggaaatctttctaaagtgaactctgcgtttacttgccttcctctagcagggcatgatggacactgtttgacctttccttgggttaggtcttcactacaaacccagccatgcctttgggaggcctgtgaaatgcgcagggctgccgtccctacactgaggccccatcctagcgcgctttgcatggtctcacgtctgctgatagggcttcacttactctcttagtcactttcagtcctcctgtttcctgtggccctctccggacttcatatctgtacccaccaaaattgttaatatttacccaaaataagttagtaagaagccctgaggggctctctgcttgtgtcttcatttgtggacttaaacatcacttctgattgcttagaggccccgtttactttctccatggcttttggcttcattctggaaaattaccactgtatgtttcatgcctttcaacctatagggacaaaactgccagggtcctgtttggcagggtggcctaaagcggctcttgccagcccagggaggacctcctagatctcctgctcagataggctttggggctgctctgtggcacatgcatctctgtccagggcacttccaagaccaggctgggacacactgaccttgaggactgctgtgcaggagaaactaagcatgtattccctaatggcgggcagtggttcctgccactgttgctctgagagtggagtggagccccaggctgctctactcctcagacctatgcctgtttttccaattctcttccccactcataattgcagcctcacctttcccacctgcttctcacaaaataaagcatacttcttgccatctgccttgaccccaacaccccactgcctgagttgggaggaaggttttagagaatcctagagagaagggtgcctgtaaggcccttgagaacagaaagaacccctctggttcatttcagtgcccccatggatcactacaagagagtgaatgccaattacctcacggttaccagaatcaggcacaagcagagactcagaaaggaaaatgcctccttggcttagtaaaacctgtggtcactcagaggccctgagggtgctaacctccagaatcttccttggcaagcccagaggaacccggggcctcctaaggtgcagccagcagcaaggcaaggaacgattctggctggctgcggagctgcctggcatggggagtcccagctttggcctcctaggttaagttacatggtacctctgatcctcagcttcctcatctctaaaatgggatgattcccatcttacagggttatttcaaggaccaaaggggggaacaataaatctaacacatgttgcctgtcatctgaggcactcttagctgatgtggctgcttggaggagagctgtgagggagggatggccctgtggcctcaaggtgggcgaggagactggggctccagagaaggctaatcacagctcttgtgctccttctggcactgactgacaatttgtacctagatcaatgtcttcacctttctaaacctcttaactctaaaacatgggatattaaggtccacttaaggagaagtaattagttgtgagaattggataaaactccatatgttatggaaggatctctcatagtgcctggcatatagtcgcattcagtcagtgttccagttatggacctttctttacggctatgttttgtccaggtaaagcccacttgcttggacctagccctgtgggatggctgcagaagttaaccagtggttggattagtttgggcaaatgagaataattgaggtagtcagaaatgttccctgttgctggtgacatcgttttgaggaggcattccccagttagtagactgtggcactgggggctgttggcatgggaagggccaggtaatcctatgggttggtttacacagtgctgggaagttcagagcactcccagttggcacctccgaattccaagaggctacatacctgtcctatgggaggataagaggccatccccttcgtcgtgtgtacagcagccttctgaacagtaatcacgtaatcatggtcatcagttattgggcacctcccctatgcaggatactttgctatgtgcattattttatgcatgcatgcatgcatgtatgtatgtatgtatgtatgtatgtatgtatgtatgtatgtttttgagacagagttttgttctgttgcctgagctggagtgcaatggcgcgatcttagctcattgcaacctccacctcccaggttcaagcgattctcctgcctcagcctcccaagtagctgggattacaggcatgtgccaccaagcctggctagtttttgtatttgtagtagacgcagggcttcgccgtgttggctaggctggtcttgaattcctgacctcaggtgatccacctgcctcggcctcccaaagtgctgggattacaggcatgaaccactatgcccggcctatgctttaaacgtattcttgctaatctttccaacaatcttgcaagggagagctcatcatctctgctttacagatgaggatgctgaggctcagaaagatctgtcctgggccattcagggagaaagtggtggagctgaggttcaagctctcactgaccgtctggccagaaccagtatgctgggcttttctgagcagctaaagcctgtgtcacttgttttcccagacaagggaggagcaggcagggtctgaattgaacatggacattaaagtcacctggcagctgaggtccacaaaccatttgtcaagagtggaaaatcctttgtcattgccaattttggttgcagaagcagggttgagtgggggatgtgtgtgtgcatttgctttctcacatataagggccagtaactcactaagcaattcaagctgtcatagcagcctcctcttgtgacagagcccatgtccgattggctaatgccttatacccagaggcccagagagaggagttaaaatgctaattttcagggaccgctcagtcattttgatcccattaaaacactagcatccttctcatgcaaaactggtgcctcaattaccaactaattgcctgattattgtgcagggacaggagacttcagtcagtaaggggctgctgtcatccctggagaatggagtgtgggaatgcgtgtgccatgcaggtttggctctggaggagacgtgtcagaaagctgatctaggagcaagacagaggggatggtggaaactcagctgcgctcctcagttcccagtgtcttctccagctcccactggggtgacccttttccttccctccccacatcaggtgctggagacatgtgtgaagaactgtggccaccgcttccacatccttgtggccaaccgagatttcatcgacagtgttctggtcaaaattatatctcccaagaacaaccctcccaccattgtacaggacaaagtgcttgctctgatccaggtaggttggaccccttgcccaatttgttggaacagagtaagatgaagtctcttattgatgagtcctcatgctctcccaccatttggaggaaaaaaaaaatggagacttctacatttaaaatatttggtgcaaaatacttcaaaaaaaattctcatcccactggaatgaaattctaattgatggctctccagccagttaacagagccttcctgaagctttctgggtgccatccctctgctgctcacaaaggcaggtagggtggcctcaacaggcctctgagaaaacttggagtaggaagaaccatgttagagctacgtgcgggtttggtgaggtcacagggcaggggccaactctgggtcaggcggagcaaggtaaggggctggggatggtgttaagggatgtttcactgaggagatgacatttccattggaccctgaagaatgatggggagtttggtggaaaagtcagtgggagagacttcacaggcagggagaatagcatgtgcaaaggcccagacgcatcaaagagagcagttggcatatttgggttgtatttgttatcactcactgtgttacaaattacctcaaaacataccttcaaacggaaaatgttcattatctcttagtttctgtgggccaggaattcaggagcaggtggctgggcaattctggcttggagtctctcttgaggttgcattgtctgaaggctcgactatagctggaggctccacttccaccatggtgcacccacatggctgttggcaggaagcctcagttccttgatgactattggcaagagacctgagtttatcaccatgtggacatcaagattaggtcttgatgacctagccttggaagtcacataccatttttttctgttatattctatttgttagaagggagtcaccaggcctagcctcaagagtaggggaaataaactccatctcttgaagaaaggaggatcaaataatttgtggacatgttgtagagaccactatgtggggaagggggtgtaatgaagaatgttgggggcagggcttggggtgggggagcaggcaggagatgggaccagaaggatgcccagaggccagtggccatgcatgctgaggaggcatgcttggtcctgtaggcagtgggaagacatcgaagggctctgagctgggatgtgtgcagacctgggttttagacagagcacgtggtgacacagaaggcacataagtcaacaggcacatccagcctgggtgattagtgctgtggcagaggcaagacaagggcctgcaggagccaagaggagagacaaacctagggctgggcgtggggctccagcaagggcaaagggaggcaaccaggcagaggcagcggagaatgcaggaagtggagtgccggggcaggccgggctctcagatgggtcaggtgtgcagctggagaggagcctctgtccattccctgtgctcacttccctctgcctgaaaggtctttccccagctttcagagcagtgactcctcctcctcattcacaggtgcctcggaggcctccagctggttttaagcacacacactctctgtctcacatcatccttttttgtggtcttcaagactggctttgctaacatttcttttgtctgcctcattcttcgttccctaagaacccagggacatgctgtccccagggtctagagcagtgtaatgtgtagagcgggtgttcagtatttctttataatgaatgagtgaatgtagttaattctgaggaactctgggaggccttcccctgtttaccctagggttgtccctcgtccctgttctgcccacccaatatccttctgtctctctgtctccctctgacacacacacacacacacacacacacacacacacacgtgtgcatgcactttaccttcctcatacaccccactctaccacagcccttccttctggggctgcactcccctacctcaatacccccaggaattcatgttaggaaaacaaatggtggcttcttctcacaaagcatgtcctgtggtagagctttctgaccccgaggcctgtctgcagggtggcgggcccagcagggtggctagcctaccgcatggcaagcacagttatcacaaggggtgtgaactgcactgtccctgctgactgtgtggggaccatggctgagggcagacacagccttcttcactggctgtggcccacacctctaccctgaggatgcctgtccccgcacaccctgccctcacctccaagctttcctatcaggatcacccctccacactttccagctcctcctagcttttacccagtcctgctgctaacctcagacaggtgtactaatttattgtgggcatgtaccaccttatctgtaaaatggaacttggggttcttgcctgtctgctctcaatcctgagcccatgagatcagcccaaggtgtgaagtggccagcaccatgttctgaggcctccccctgctggtctggcagtagcagtgtgtgctggccatggggacctgagcagaacagggccttgagatgcctcacaagcttctgcctggctggacagtttcctggtccagctgtgaaaagcatgggcttcagataagggtgctactcctagatgggggttgataacccagctggagagtgttcttcctctccagatttgcagtgttcctgaagagctcttacctttggtaacggctgcccagcagaggacagcaggcagcattcagctgtgggtggcttggcttctgtaacagggtgaaccaatggaataaacaggatccctagccctttcttttttttaaacttttaattgaattataatatatatacaggaaatcacacataaaagtgtatacaacttgataaattttcacaaactgaacatgtaaccagcccctgcatctagaaacagaatatgaccacacccaaaacctcccaccttccggatgaccacttgcctgagctctcacagcatagacgagtcttctctgttcctgaacttcatccagagtgctctgttgcctctgctgtgtttgtgggtgtcacacgcattgttgcctgtgattctaggtctttcgttgccattgctgtgccaagtcctgttgtgtgaacacactacagtttatttacccctcccactgttgatggggacttggtgtttgcagtttgggggtactgtgaaaaatgctgctatgagcatctagcacttgacttttcttgagcatatatatattcctttttaatgggaatatattaagttgaatatgtgaaagtgccatctttgttggtcaaaaatggccaaatattagcaatttcatatgtatccacctcataccggggtgtgaggttgctgtgtggtggggaatgggctccactgggctcttgggtgttctcagccaccagcacccaagaatgttagttgcttcgcatcctcacccacacaccctgttttcaatcttcttcattagagcatggagtagcattgcattgggtcaacctttttttagcccctttgagaaagaaagtacttttatttgcatgttgaatatactttagaaaacttaagactcccccagagactctgacaattcccccaggagagaaagtgctgctcccaccatgagacaagaatggggttggaggtgacaggtcactggctgccttgccagcctgtgagttggtagcagctctcatatcaatgcggctaggctgagaggaggttcagctaagtgtggggtgccagagcggtaacagacttctctgcaccatcgtggtatcaggatgcttcttggtgctcttcagagaagtgggacagggtcagtcctggccctaccctcagggagcctgcagtttaactggagaagcaaaggtttgcagatgacagagggtgagggcccagccaggaaggacttaaactggcttttgactgtttgtggcttgggggtggagtggggtacagccttaacctttccattatggaaaagtagatcgaatgtgttagcacttgaaaagctttcaaggtaaaggggccacacagacgtgcctccctaacacctcctgcctgtgaggcatggttgggggtcctggcagaggtagaacccatggctctgattaccagctgctggccaaagcccactgcccctttggttgccctgaggatggtggaagcagagctgcagccagattgaggggaagggggaggttgggctccacactagcttttccaaagtccccctgtgcctatagggaagtgggtgatagagctcatccgtgcatatctgcctgcccccagcccaccttctgattccctttcagagtgccattcgcaggcatggtcagcctacccagtggcacctttgccatcagtagcaccctggccaactgcaaagagaatccagctgatgcctacccctcctttccccactgtactccttcctttcccgtatgggggctttctgtcttctggctgccctccagccatccgtagccaccccatccccctcaacccgccaaaagacagacccagcagtgtggttctggtactttttaccaacatgtgcgagggctcagtcggcttacccgcaccacaggatctgcctttctggatggagccggtctccctgggaggatgggaggaaagacacattgagagtggtgcagcctggttggtagcttgctgacactcacttctacccccaggggcaccaaagacttcccttccggcagctttcagcttcacccctatgttttcacctcatgccttggctggtgttttggcttgtgtccctttttgtttgcttacattaagtcccatttgttgagaagacaaaaaggatgctcccactctatgccatccctgagcctttcccttgaaattgttttcaggagcggaaatggagtcatcctggcagagtcacctcagtgtggtcatgcctctccagcccccctccccatgccccagcaatagtctaaccatatgcactttccactgaagaaagtgaactgattggggtggggatgggagtggggacaggagaaactggaggtgtgtgttctttgaagacgtcagagcctggtagctgggctctggccagattctgtgtggacagcagctccctggggaccctgtcactgggaataggaagtctggtctggggcataagcaggagctgacagaagctcccttctatccaaaggcatcccagagcccatagtttaaatcagcaatggtttattggtctgaaatttgatgattcaaagctttgtcaaaactttcagggatacagaaatgaataggttatggtttatgtttgtttctggttttattctggggttttgtatacggtccaaaggaatgaaggagatctgaattgatctctttccttttttctcctcattagaccttcctctgggtcttccaagcccctaatcttgtagccacaggcaggaaaagaaggcttccagtgaactgaccacttggccattaaccagctagctcctgtgacaggccctcagagtgtgctcacaccgctgcatcactttgctttctgaaaaggcagctttaagagggggcagcctcccccaccctcagtgctgctctcaggcttcaggttaagcactccaagagtggccagacctcctgaggcttgccacatcttctctagggagtattctcagctgggtcagccttccagcacccctcctttgtcactgtcacttcagtctgttgacagcctaagtggccatctttcctctgttctctgaagtaggaaaataaggatgcttagtaactgtgagaactgaattcagtttaacctgataaatgttgactgactgccttctctgtacacgggtgagagactcggtgtctgccttcaaaaggtgtctgggctgggcgcagttggctcatgtctgtaatcccagcactttgggaagccaaggtgggtgaatcccttgagtccaggagttcaagaccagcctaggccacatgatgaaaccccatttctacaaaaaatacaaaaattagccaggtatggtggcacatgcttatagtcccagctactctggaggctaaagtgggaggattgcttgagcccggaggcagaggttgcagtgagctgagatggcaccaccattgtactccagcctgggggacagctctgacccatgcccaattattgaggcatgtcccaagaagatgctagggacacatggcatctctggatgtctcccatctgtacgttttcacatatgaatgggagacacccagagatgagagacacccagagctgcatttattcagaggcgcccctgcaccccattttttcctctgttggcatgagaatcctattcaatagagattgccatcatgaatatctgctctgttagcagccatctcatccagtctgcacagaggtcccagataagggttggaattgtggcaggtaggaagcgggtagattagccaagactacttgatcgcaaataacagatgccaactccagcttgcctaggcaaagagaagagtttgtcatgacagggcagagtctcccagaagtccaggtcaccccgccctgggaagggacagaaaatatcaggaaggccttccaaatcctctcctgtacgcctgcacctccgagcactctagctgctccttctggagaacataggctgtctctgcttccagtcctgtgctggcacatggccctggagttacagaggacagttctgcctacccagtgagaacatcccagcttctagtgctgctgagttcctggaaggaggagcatctgattggcccaacttgggtgtgcatttccctcccactccagtctgtctctgtgaacatggaagcagagtgccttagaaagtggacccgaagaagtatcctccaactggagagaagagccatagttctttcatctttattcctattatctcaaatttggcttgggtagagagctagatgaattgaaaggaatccctggagctgttggtactccatgtacaaaggcatgaagtggtgccaggaagaactgccatgtgttttttccccagcctccgacagtgggctgtgaaactggtttttagaccctaaagtcaacaccctaaactaaaatgctagggcattttgaggttggcgtcacaggacttagctggattttgaaccaggtggaggcagccagcgcagctggtgggggcggggccagaggcactccctacgggcaacctactctcctccagctgggccttccagacagtgctctgtgaggcactttctttggccctcctcagaatccagaaggagtgttggccaagaggggctgtcctgatccagtagttttaaatccctgagcatgcaaattaaataagtgcatcagggaaagccgggctgacagtactgttcctggtgagatgcatcagtcataattaaggaggctttttggaaactgaccttttaacttcaaatgggtctgttggttagagacagagtttctgtggctgcctcaggattggttgtaccacattgctggagtgagggagacagttaaattctgtgacaatgacagacttggcaatggagtcatgggcacaggaggctctgcctcctcctttgggtatgtatggtgaatgggacagcatgagaagggccatttctgggaaggcctttgagtattctgtttttgatacagtccaagacttccaaagaacagaatttttttttttttttttttttttttgagacggagtcttgctctgtcgcccatgctggagtgcagtggcgccatctcagctcactgcaagctctgcctcccggattcacaccattctcctgcctcagcctcctgagtagctgggactacaggcacccgccaccacgcccagctaatttttttgtatttttagtagagatggggtttcactgtgttagccaggatggtcttgatctcctgacctcgtgatccgtccgcctcggcctctcaaagtgctgggattacaggcatgagccaccgcacccagcccagaattttttttttaatttttaagtttcatgagtcaacagaaatgataatctacttgaatttttgctctttcctctctgtgatatgttttcactgaagggaatctggtgattgtgcttttcttgggatttttcgatttgggcacacatgtgctgacatttttggcagcggacatcatgaaagaagcttgggtctgggaaaaggacccctgggggtgaactccccagtctggcctgggtctagctcccaatgggctcttcttcccttgaaccacagtcatctcacctactggcagcagcgctagacagagctaggctagacaagctcagcattagttgtctctgatctgaggaaacctgtagttagcctttacttcatgtcacacatcaatttctcctttcctttctgctcaatttgttgccggttcccaactccaccagtagaagctttcagggcagaggtgctcccgcacagagggcaggcaccctgctgagctgacaaggctccagcttccactccctgcagctgaacagccccagcaattgatttccttgccattagggaaattcctgctttttaggatgcaccaccgtgcataggtgttatttctctgtctcttctccaaggaaatacatgctaaattaagttttgtgtttttgttcacgctcagcagcaccattgaaagccagggtttcaccagctgtgtcgtggcagcagttgcggaaggagaggaacagaataggtttagccagtgcaatttgcatgtgcaagtaggagagcactggtctcggggagaggacgtgggccactttggattttcagataccatggcagctctgagaaatgcttcctaacaggccttctattatcccaggcatgggctgatgcctttcgaagcagtcctgatctcaccggcgttgtgcacatatatgaggagctgaagaggaaaggggttgaatttcccatggcagacttggacgctctgtctcccatacacacaccacagcgggtaagcttccagctggcactttctagaaagacctactgcagaacgggtgagccaagctgctgcagccacccttctgctgctgcctttgaattattcagcttgtcatcatgctttcttaaagctcgggggcattcctttttaataacaaggggcatgcaggagtgagacagctggttgactggtgattaagtggcagcagtgtctgtggaagaatataataaagggatcagttcagggttttcatggaaatggctacttgggcggagccatcctgtgagggtcattagcacctgcttttcagaggcccctagaatctggtgtgggaatcctgttgtccctcagagcaccatagcacctcagggcttgatgtcactcttgggtcaaaaagtagctttctgttttttcaattgtaccaagtcaaatggatctaaaatttattttgagctgtgagtattcagcatcaatccagaattgattctggattcaatccttgattccatcagccttgggatcaaagccctgggaaggtccctttaggggcatcccaccaaagcttttgcagtgccaacagtaacttgagcaccgtggagggggcagcttggcacttcagggttaaaagcatgtaggtcatgcctcatggtttctcaaggaagctagtccctctactggctgggaatcaactccactcctagcctgggggagagccaggaaagcaccagggtctgggagaggcacctcatcccagtacacttcaccttgcctgcccccactgcccatctctgagaaggatagcacacctgtgcacatctctcgtaggaacacgacttaattttaatgtgcaagaggtcatctgagatacccaaagggcaagcatgagggattgccctttctcttttttttgagtcggagtcttgctgtgtcgcccaggctggagtgcactggcacaatcttggctcactgcacgctccgccttctgggttcacgccattctcctgcctcagcctcctgagtagctgggactacaggtgaccgccaccatgcctggctaattttttgtatttttagtagagacagggtttcattgtgttagccaggatggtctctatctcctgaccttgtgatccacccgcctcgtcctcccaaagtgctgagattacaggcgtaagccaccgcacctggcccaggggattgccctttctggaggctgttttcatcatgatccctccagaccacgcgctatgctttgtgaaatcaacataacctgtttcattcttctaataatgacagagagcagtgttgttgttcctataattacaaaaaacatttggtaaattgcataattactatttatattagtctacttgtaaagaccaaaaaagtaattcttatggtaccaagtaaagatctgtgattagcaaaacttaataaccgccctccctccacttggatcccgaggtggtcttaataataggaaccatgaccagagggctcacagagcactctcggtgctgccttttggagttgctttcattggtctgccacacattccttgagaggtaagtagagggaggagccattggcagccccacttcccagatggagagcctgggctcagtggggttctgtgaacctcacccgggcagcagtggagcagggccttgagcctttcgtgggcagccttggggaagtgctgcatggggtggggtaggtaccaggtccagctatgcaggcagcccaggtaaacagaggactttgttgttgccatgccagagtgtccctgaagtggatccagctgcgaccatgcccaggtcccaatcacagcagaggacaagtgctggttcctattcctcgccgcctcctgctccctactccgcaccgcaggccccagctctgagtgtgactggccccatcacagccaattcagaacaggtacttgcatacttcggggccataggcaagccagctgactatcctttttcatctttctgggagacacttacaaaggcctcccaagccaggtattgtgctgggtgttagggacacagagatggaagggctcaatccccaggggagagagatgctgaggaagtcatgatggattgtggtcaggctgtggtggggagcagaaccaagggctcagagttgtgagcccagggttgagtggtgcctgggaggcaccggggacctgacatgcagagggtcctgacacaggagttgggctttgtcaggtgagaccgcatgctcagcaatgacatttaaatgcagagatgcagacgctgctctctcggagcagcaggtggcttgattggagagcaggcgcatatgtagggcccagatctgggaggaaaccatggcagaatgtgaggccaaaagcatagacgtgcagctgagttgtgacgggcttgtctatcatgcagaggcttagatctatcccataaaaaaagtcagccatcagaggcctgtgacctgatcagggaggccctcctgaagcacaagaagcctgcttttatcccaaacactccccaccctcccgggttacttcctgataaactaatgcagttttaaccccacactggattttttagatgaattggggagtgctctttagaagaatccatagaacttcaattagttacaatttgagaattggtcagacttgggggaaaaaaaaactctccaatgtttatatttaccaaatccttatttactatttgcgacaatgtcatgactgtggaacctcactgaagcagaggggtcaagcaatgtgtgtgtagggatagcaatgtgtgtgtagggatggcagtgttgtgtcgtgttcctcacacttccctgctagctctgagcagggagtacggtgagagcaggaggagtgaacttgaagcccccagggcctgggtgtgagcccccagctctgctgctcactctaggcttcagtcaggacatttaaccccggtctcccatcagtagaacaagtgatttgttaccccaccaggcagctgtgggcttgacaggcagatggaagaggtcctcattgtggctacccaagtgctgtgggaaagaaggtctctggcttttggccctgcttctatgggcagaactgtgcccttcctgctctgagggaaggcagaaaatgtttgaagttggacagttactgagccccttcaccgactcaaagtgtgggaggtgcttgggaaggccctcctagtagccagaagatgctgggtctgcagggtctgggcataggtagcacaggagccctgaggcatgttgccccttggagagcagaatgcaagcagaggtaggcaggtcagcacccagcctggccaagaggacccagggcttcagagtctactgggtggctgcccatagccttcctgggccttcctagccagaaacctcttctctctaccaagactttgaagaaaacccctggatcatccaccaggcagagccagaggctaacaagagcctctcaggacccagaccatctccctggtagaccattgattgaggtctcctgtccctgtctctgtgctgagggtataaagctcaacccagctgagttcctgccctaagaagctaaaggtctgctgagagagcccacccacacaggagaggctgctacagctgcaatagtggaagatggcacagcgagtgggaacctgaggaggcgggagtggttgcttctacctcaggatggggtggggagagtcagaaaaggcttcactggggagagaagttgtcacttaagctgggtcacagtgcaggaagaatgacattacagttcctctctctggacctttgagcaggaacaagggccgtatgtgtgtagtagagagcatacctgcatgccaggcgccgcatgggaaactcacagcagcctggtgaggttagtgccacctttctgtaggtgaggaaacgaaggctcagagaggctcaggtccggctctggatgttgctgctgagtcttccagggctccctccagtgtcctgtgcagttcttgacctctgtccagcgttatttggtctcttgtcactgagtgatgggaccagtagccacctctatgcagattcttctatgatatttcactgtgggcaaggaaggtccctgtggtttctgcagatccttcgagggggttgagggagtgaaggggcagatctgaggcacaggactgagggcaaggggagaaagtgtatgatgtctctgttgctggagaggagccttgggccttggcccaggtccaggctttgggatcgctgatgggcaacttgggtatttttcaaggggctgtgttaccatgtagggagctgggtggggaaggtgtctcccctgtcgtcttcccctgttctctcattcttgccgcagcagaaaagtgctattgacactgcccagcctctcagagggatcctagtgtttagatgtaaaactcctaggagcagagtctataactcagagctttgtagaataggatctcagctctgaagggatctcagagctcctgccctcctgcacttggattttaaagagcaggaacggaagccctgagaggttcagcttctactcaagttcccgtggtgggagagccgagacggagagccagcttggtgcactcctgacacggagcccttcactacgtggtactgctttcgtgtcacagtcagagaggcacaacagactgttggtggcagggcccattcagctctctcagagctgacaggcaggccagagggagatgagaaggtggcctctgcagtgtgcactcagaaaggcaacccagatctcccagtgagaaggattgtcactagactaggagcaagctgattctgatattgcaagtgcaggctgactgacctttccttcctgctttccttcctcgtggcccccaccagattgccaggctgcggagtgaactggacgtcgttcgaggaaacacaaaagtcatgtctgagatgttaacagaaatggtccctggacaggaggattcatctgatctggagttgctgcaggtgagtcatctttcagaagcacttggcctgtggtggcagctcttccaccgtacactgttggaggatcccacccggggacacagcggcaaggcgggacaggtccagtggccctgttgttgatagtccatgtgagcacacatgcagcctcacgttgcctacggacaggcagaggccagtaccactgtctgtcttttttattttccttaataacatttttttcctgattataaaatgccagttgtagaatacatgctcacagaaagaaaaagaaagcacagaaaagaaaataactttctttgacccaagcatctgtaaataaccactgtaggtgctttgatgtattttctttctgacttttttgtaggtttattttaaatgtagttgagcttgtactatttctgtattttggtccctcaacatcacattttgcaggagggcctgttcaaccttgactgtgcacaggagcccttgtagtggcacctcacccccaaggtgtcctgagactgagatgaagtgtgatgctcccatgcttttccctaacactgaggattcccaggcatattgtggtttgccattgcaaactggcctccccgcctctggacagcccatggatctgggggcatggcagaatggggtccaggagtgggcggcctgcagtctacccctgaaaccagggtcaaggcccccacctcaggcctgtttcccagggcagccaggtccagagccagtgcccagatctccaccacacccagcctcagatgaccctggcatttgcagaaaatgtcagtggtactgcccttagaagcagtgaccttctggagggtggaagaaggatgctgtgaactgcaaggccccacacacttttcaatgggaggcaagatgcttgagggaacaggtcaggagccagactgatttagcaacctggcatgagtttctcatgatacacctgctgctgctgctgatactgccatttgtgtctggccctccgttgtcagtcttggtccccaagtgctacaccttctaccctgctgctggcacatgcttgccgcctgtgaaggccctgtcctggtcccaagttgctgcttattgtgcccccttcctactccaaagccatcggctcttatgggggtgagggtgggtggagacctgttccaggcctgacacaaaacacagtcctaggggcacagaggtgcatgagctgtggtccctggagcttgcagctttttgcaggaaatagaccgggaaacaacttgtctccatgtaactacaccagcctgctcttgaagctgagaaaagtacccttggcccagccccagtgaggagtcctgagtggcctctccctagttcccagacctcactcctgacacacctgcatcagcccaggcttgcctcagctcagcagatccagctgaatatgtgccacactccaggggacctggcttcccttgaatgcattgtcattggcctccattcctagcctgcaggaaggttcggccaggcgttacccagatgcacaggattctgaggtcagtccagaaactgagaaggcctcttgaggcagctttgtgctgtgtcagcgtcggaattcctgctgacaggggggatttgctctggatagagccgtgctcctggcagcagggggtgtgttgaacaaagccaagatgcttccagacagccagagcagacccagacagcaggaatacttcgtgttttggggggagagggggtttgggatttttttttttttttaaacaagcccatcagccaagacaaacagaacctaatctcctggcgtcagctcacagctttcaaaaataggttgcttcccatgacgttttccttccctctgttttgttccaactccaagcctcccagccctcactgctatcttataaatcaaatagaaaaggaatgactctcggtgccagtgggaggctgtccttccagcaacagcagattcaggagctgggcagcactgtggacagccgtgaacagacacagccgtcctggctggttggctgcacgcctccgccattgccgacatcttcccaccccttcttcccctggcagtcaaaagccagcaggcagggtctcccaagggtcagagccacactgaacagccaaccttccatgtggagaaataccactgtctgcttagaaagtgctggaatcagaatgtgtccccaggaccctccatcaagctggagggcagccagagtgctcggggcagagaatacagagctgagagtgctggctaggccatggaaacaacccagatgttcccaccaacagaagctgctcccagttcaagtataaattcctggggtaggaggtggggggaataggaagagagataattggtggtgtcagccctaggatgatcataactgtgggcaggttatgtcccggttgcctcctgcacatcgcaaagcacttttgggtgtagcttcccatagtgaagcaagagcagcagggaagcttggcagtgtgagctgtttgcctgcagactcatgggtatgtggctgtatttgaggagaggctgaggccactctagcaccctgtgctgtcagcgtagctggagcgcctgaggagaaggaaggaagggtgcccagagtgaacacagcaactcctcctcttgagctatgcgtcaaatcctccactctctgagttgggagagaccttccaggaagttggttcagttctacacctgtgttcagatttcttccacagcatcttatctgttgggtctttctgcgtgtccccagtgacaggctgttcacagcagccctcttgctttcaaatggacatcttggttagacttcgggcagcagcacagcaggcatacaaattacacaggcctatgaattaatgcctccccatccttgccctcccactgatgagctgggcgatgccaggtaagtcaccagccgtctccaggcccccttctcctctctagactggagtgatcacttgcaccttggcagtgcctggcgcagggctgggcttaggcaaggcctcacaaatcctagctttcgtgactattgttagaaagccctttcacacattgatctaaggtgtggctccctataactttgatcctggtctgtcttcttagacactagaacaagactaattcctctttcacatgggtagatccttaaatatttgaagattgccataagccccacccactgcacagtctccacatggaacaaatgtggcatttggcagcatttggcagcccaccacagggagggataggcagttcttcacaagaagcagacataaaatggagagcttccatcagctgaaaaccctgctgcgtcacttctcatctggtggttaagcctatctttgtcatcctgttcaaggaaccttaggtctgggcccgaaattcaagacactgcatctgtccctgctaaagtgcatgcccttacctgcagaaagcctgagtttggctttctgggatctttaaagattgcgattatgtcatccagtgtcctctgtctctcccaatttagccttttgagctttgtcttcaatgaataacttttaattaatacaatgatgccaaaaatatatgttcttctgtggccgttcatcagcataagataataacagaggcctcctcgtttctccaagtagcagatggtgtatctcctcttgcttcttgcgtctcatttcaacaaagacagaacggccaaggccattttctctagagaaatctagtttattctacatgtttagcttcattattcccctttctcatcaacaaagacttttttctccctcccatctttgcagcaacagaaaacagatcttcaggaccttattccgtgttccttcaaacttgtggagggctcagaggaaatccataaagatgattaaaagactgttgcgtgaggtagagatgagaatgtcccttgaagaaaagataaaggcattgggattaattagatagaaaaaagaggatatttaccaaggtgttctaatagttggagggcttttgtacaagtgaccagctgttcttccctctgttgaggaccagaaatgggagaaggccaaagctgaagtcgtcagcgtttaggaaattcctgtcctggctgttgcacagtggaaagggtgacctgagcaagcagtaggctcttgggtgtcttaggcccaaagagaatcacactttgagtgatttggaggtggaggaagcagaggaaagtctcccaagtgagcctgctgagggtctggctgtgatgacaccacagaggacatgcaggtggccggctggcactgtggtagcaaaagtctttaacatctggccctcctttcaccttctcaccttctgtcctttttttttttttttctttttttctttttgagaaggagtctcgctttgtcacccaggctggagtgcaatgccatgatcttggcttactgaacctctgcctcctgggttcaagtgattctcctgcttcagcctcccgagtagctgggattacaggcacctgccatcatgcctggctaatttttgtatttttagtagagatggggtttcaccatgttggccagtctggtcttgaactcgtgacctcaagtgatccaccaacctcggcctctcaaagtgctgagattacaggtgtgagccaccacgcatggccttttcttcctttttgagacaggtgtaaaagactgaagccaagagatggtaaagctttctctgtgcagagacccctggaaatccctgatgtggaagccccaggtcatagtctctgggcctgtctttagcatagctctttggaaagccatcaggatgcttctccaggattggagcatagaggccctgcctgtggggttgggagctgtctaacccaccaccccagtgggaaggctgtggggaagaggcagcaaacacaaggccagagcagatgttcctggtgctgactgttgatgagatcactgcattctgtgcccttggggctcattcttcctccaagctgaggtcacaatgttagagcctcagaaatcatctaacactttccaaacgtttttttaaagtaatggaggccaggcatagtgactcacacctgtaatcccagcactttgggaagctgaggcaagtggatcacttgaggtcaggagtttgagaccagcctggccaacatggtgaaaccccatctctactaaaaatacaaaaattagccgggtgtggtggcgggtgcctgtaatcctagctacttgggaggctaaggcaggagaattgcttgaacctgggaggcggaggttgcagtgagctgagatcgtaccaccgtactccagcctgggtgacagagcaagactccatctcaacatattaaataaataaataaataaataagtaatggctgggcgtggtggctcacgcctgtaatcccagcactttgggaggctaaggcgggcagatcatgaggtcaggatattgaaaccatcctgactaacatggtaaaaccccgtctctattaaaatacaaaaaattagccgggcttggtggcaggcacctgtaatcccagctactcggaaggctgaggcaggagaatgtcatgaacccgggaggcggagcttgcagtgagccgagattgtgccactgcactccaggctgggcgacagagcgagactcccatctaaaaaaaaaaaaaaataagtaagtaaataagtaaataaagtatggaaccttttcctccacaaataaaattttacagtgaatggcagtgtttaaaatcgagaaaagcagagcagcctcagctgccctggccccgtgccatggaggccgctgcagcatgacagtggccttctgcagaaaaacttcctcatgaatgcagcccccttattttacccagggagaagcaggcctggagaggactggagacttggagagtgtatccagtcacaggctacttgctgcctgcagcttcgtccccagcacccagctggggctagggctctgttgaggagactgacatcaacccctgctcccttccatcaggccgccggtgctgggagtatttgtagccatgtttctgagacacttcctgcagtctactgaggaatctggtttggttctcctctaaatccagtgaaccacccttgaggcctactctttgtttcggggcttctgctgtgtggagtgcagatgggggctggtcaccccttgctggaggtttttgtagaggggctctgatgacagactggagtgtgttgaatgctttgggagtcttgaggagggtggggtggtgggagatccccagaaaacattgtatgtggacaggaagatgaataaatgggaagtacgtgttaaagctgtcactgtaaaatgttaatggtacaatctaggtgataggcatatggtgtctgttcactgtaaaattcttcctgttttgctgtatgtttgaaaatttttatgacaaaatactggagtggggaaacatcctgaggccttgaaggatgagtaagagtttgtttgatggaaaaggaaataagggacattgcaggcagatggccaacttctcaggagcccttaagcagtgtggcaagtgcctgaggccacctatattctggaaagtctgaggtgtatttgaagatggcctgtgggccttaggtgctgataccccagtcttctggagggtaacttggatctgtttcccacaacctactgccacactcccctgacttgcacgtcctgtgccttgtgattggcctgcagtttgcatgagaagtgattgacttttttccttctccctccccagccaaggacagccagggcttgctgctaggccacaagccccagaggccacactttcttgtaatgggcctgtttgctggagggggtgggtcctgagctgggacttgagatccttttgctcatcagagattttccgcagacacctggagcgctggagcaaagaggagctcagcagtgcctggctcggtcctcatgtgtgttggcacgtccacatccctggggaggagacccgcacggtggcccggaacagtccatggcagagcagagaggcagaagtttgtttgacctcttttctctgtcctactgcccagcctcccttttccatcctgcacactttggccaggtctccctctggtgcttcttccaaagtatggggtaaatctactgcccaagtgttggccaagtatcctttttttcttttaggaagcaggggaggatggtctgtcaaagttaacctaaatctgtgctcctctgtcagccctgaacagatgctcactgtgttttaacaatctattagaaatactataattattttaattgttcacttcagtcctggctgttggaatccttcacgtgatctatgtgattgtttctttcataagtttggacatttttattttgtttttgtttgttttaatgttaagggcctgccttggttttctgcatcactcctgagtatgcttcattctgtaatgagtgtttcccctgtgttgttggttttcctgtgtacagtaattgtgactgggttttgacctgtgagtgtccattggcgcctgtggccattattgcctggcaatccagaccacgtctggcaggccccaaggcccaggcagctttttgagagcccctctcctgcctggcctggggacatgagccattcacaacagaggagagtgggtattttgtggagttttctctttactggatagtagtgtcccctgcaattaagatcccgtattcacctcttattaattctagcacttgtctgtatgtttataagtgcttactgctggttcagtggggcctgggatgagtcctagagagggaaaattagatcctggatgaacaagaattccccattctctgagtgaagagtgctgagaagactgagagtatgtggataactgagctggtaatttgcggggaccaagagttcagaatactttatattttatttttattttttggagacagggtctcactctgttccccaggctggagtgcagtagtgcaatctctgctcactgtagcctctgcctcccggattcaagcaattctcccacctcagcctcctgaatagctgggattacaggtgcatgccactgtgcccaatttatttttgtattttttcgtagagatggggttttaccatgttggccaagctggtctcaaactcctgacctcaagtgatccgcctgcctcggcctcccaaagtgctgggattacaggcatgaggcaccgcacttggcctctgaatacttttttttgagatggagtctcgctctctctcccagtctggagtgcagtggcgtgatctcggctcactgcaagctccgcctcctgggttcacgccattctcctgcctcagtctcccaagtagctgggactacaggtgcccgccaccaacgcccggctaattttttgtgtttttagtagagacggggtttcaccgtattagccaggatggtctcgatctcctgacctcgtgatccatccgcctcggcctccaatagttttgggattacaggcgtgagccaccacacctggccccggcctctgaatactttagagtcattaattaattctctcagaagtacttggggagagcctcccatgtgtcatgggtaccagggaaataccttctctgccctcaaggagcttcagtctagacgggagggcagataagaagcccagcccctgtgtgagtgctgtgttgcaggataccagggacatgcaggggggatgcctttgattccccactggctgattgaccaccttggtgatgtgttcagcagatgattactgggctttttcactgtgtgtggctcagtgcggggcttgagggcatccttgagtggataaatggtaacaccccctcaagagtttatgatgtggtaggaaggaagaccctgtagccaagctagcaagattatgagacaatatgaggaactaaagagagattgccgtgtctcctgtgaataaatcagttacttctaccagaaacggtttcaaaatgaagtcgttttgaggctgagctgtgagaaggagagacttatccttcatgtcttatccccttaactcactggcaccctccagtgcccaggtaggtgggaacagcatttccctctgctttaaccctgtatggcacactgggacttgtagctttggtcacatgcttgggggccagcctggcagtgttgccagctccctcctctgtagcatcctcagtctggcatcgagatggcaaggggcctggcaggaattgacggagctctgtaagcaagtttgaacaagggcatcagtaagtctgctgttctggaacagggaaggctcatggaagccaggccataaagtgctaaggctctgtcgtcacggggatgttgcttctaagggtagagagggctccaggggcaaccgggggtgtgcgaatttcctctttcggccagccagggagctgcctgggcttctgaggtctcggcaaagtggcagacgtgccaccaaaatatacctaatgcagtcataaaatacactcctgctgttgctggaagtgtaagtaaactgatgtcatatttttggagggccttttactattactaattaatgttataaatgaccataccctttcacctagaaatttccctgctaaggaacctgtcctatggaagtgcttgcccaagtgcatatgcatgtgtgtgtacaggtgttcattgctgcattatttaggttggccacaaaaagagagaccacaatctaaatgtccagcaatagaagaatggcgagatacattatgaaacacacagaaaggaatgaggcagtctgtaccaagtgatggagaacggtgtctggaatattttgttgagaaaaagcaatctggaaagaatcacattttaatattttttaatgatttgtacaagcatgtacttgtatacatacaacagtatgtctggacatttgtctgctgaaaaagtacttgtttcctctgcggaaggaggggcaggcagtgaagagggaacttctactttgaattcggcacatgtctggttttatgaacaagcatgtactccttttgtgacttttaagaatcagtacaaattttttcaaaggagatagaatgtgacgaaaagcacacccagcaggctacccagaggtgcatgtgttccctaggagctcaacaggacctgtcgggccatgcagcagcgcatcgtggagctcatctcccgcgtgtccaatgaggaggtcaccgaggagctgctgcatgtgaacgatgacctcaacaacgtcttccttcgatacgagaggtgggagccggatttctttttttttttttttcccttgaaaagattgttgccataacagagggatttctttcataaacaaaggaaagagagggagagggagagagattagagttggaaaatactcatcagagatgctaatttgttcccggctgacaggaaaaatgcttcttgtcctcctgggaactgagcagcagaagcagcaggaagttgacgtgcagaattaggctctgccctttgtaagcctcaggctgctctgcctttccccactgccccgccacccccagccccagggaggggtagcacttgggggcctctgggccccagagcttctgcacctgctcctttgatgatcctttgaatttgaaaaggattaaagggaaaaaaaatctctagtaagaaaaaggatttcctctttcccatcttaaaaaaaaagaaaaaagaaaaaaagcttttccctttgcaaatgtcaatgttatctagagcattcaggggaagcaggcgggtgtaagtgccggaatgctgctgcttagggaagcgtgcacacattcattccagttctttctgcagccaaatcatttttgagtttgaggtaacaaacctgcaaattctttttcatttccaaagccttccctcaggacaaagtccaaaatgtcttatttagacctagttttaaataggaggaataatggcaagcacagttcccatctcatcacctgatgggagcacactgggctttcatgaaggactcagcataaggaccagaaaggaccatgatcaggccaaccttttccccttaaagatgaggcttgagaggacaggacagtggcttgagtcccctgcagatttaaggtcctggtcccctctgccgcaccagctgactcacaacctactgctggattcatcaggaggacaaggacctggcatcagttagggtgagtgggacagatgcttgcatttgcgttaccctttggggacctaaagggtgattttgttatggctgtcacagccttgggccttgtctcatcttttgactacggaagtacacaccagtggctctgtgcccacctgacaggtgaataaacctctgcagtaagtgtgggggcatccccaggaccccccagtgcatcagttggagaacaggagcagatataaggggacctgactcccagcccgaggcccctttgtcttgccatgtgattccagtttctccatggtaaatgggcttgggtttaacctattaaacctatttaagccctgctagaaagcataacaggagctaactaatatgagtattttcacccaagagtctcccagtccaagcattacacataattcagaggcaaagcctggggctggtggctggaagtgctatcctggttagagtgtctttgatgatactcattgttcattgaagatgagtgtgggaaaggtaccccaggattaaaattgtttcagatgtattaatattcctgttctccttgtagaccactgttgaaaaaacacacaagtcgtttttaaaaccacagtggacactcactgccttacccagatcattcctcctggggatctctttcttgtcaccagctgctgaccccagcaagttgggagacaaatctggagcagcataactcactaaagctgggtgtctaaggctccagctggaaaaagtctcttagctaccgctgcccatggcatttggagtttttaaatacgatacagaacataatctattctgccccaccccaacacacacctcataactactcttccgttccccacctgacaggaggatgacctggccttcgacagttgctcaaagccaactccccctgcactgcctgactgggtgcagaggacactcactccaccctcctagcagtccttcgatgactggcccaggcctctctgtagcagctactggcgagcatttccccaggccgtagccagggccatgcgtccgccttcctcctgctggtgcccaccctatgtgtgccccaccccctttccccagaggctgagttgggagcatgttaggaacactagctagttgctcctgaacacagccctatgaaatagggagtctgcagctccaaggtaaggtggttaagccaccctccctccagggcccaggtgtgtgaggagaggctggggacactcacaatgacctccatgatgggccagccaccacccctttctgatgcccactctgggtgctgggtgagaagctgatcctctcagggggagccccacacagaggaagccgtggcagagttgatatatggtttcactccctagcccccaggtgggactggctggtcttggtcccagggattcttcataggactagtgagcaccccacagggccatatcacaggcatcctctctccttacttctgctttcccttcccctgttaggttcgaacgatacaggtctggccgatccgttcaaaatgccagtaatggagtaagtattccttcagaatcctgtcatctcctgaggccagacctacccctccacgttttggaggctggagagacctccagtttttctaactggttttgaaatatttgggaaattgaagaggcaagctctggttgatgggatactagggcagagctagcaggcacccctgatgggaaggtggcaagcaagccctaagtttgcatctcccaggacagtcactgttgactcagcaacccctccttctagtggggacggggaggaggcagtgagcagggctcactgacatccaggcccaccatggacctggaaggcaggtgggggaagtggccttgcttctgtactagagcagcgctgatacttttcttcttggaaccctgcatagttgccttgccagcttctacctcagagcctgactccagggttctggggcttatggccaatctcatgttctgacaggtactgaatgaagtaaccgaagacaacttaatagacctggggccagggtctccagccgtggtgagcccaatggtggggaacacagcgcccccatcttccctctcctcccagcttgcaggcttaggtgagtgtctcacagggacaaaagggcctacctacttcctaccactggcctcccttgcaggccacctctctttctttcttggaagacccaaagagagtcttttgggaaatacatgtgaaagtgtattcctgagtcctagccagttgtaccaccttactttcaattcataccttttttccccctaaatttgaagtttaaaatctatgttggaaagcagggatgggggaaattccaatgaattaaagaaaggtcacggccgtgcgcagtggctcacgcccgtaatcccagcactatgggaggccgaggtgggtggatcacctgaggtcaggagtttgagaccagcctgaccaacatggcgaaacccagtctctactaaaaatacaaaaattagctgcgcatggtgggcacctgcaatcccaactactcgggaggctgcggcaggagaatcacttgagcctgggaggtggaggttgcagtgagccgatatcgcatcattgcactccagcctgggcgacagagcaagacactgtctcaaaaaaaaaaaaaaaaaaaagaaaggtcacctgccatgttttatatggaacattccctatgattgaagtaatttccttttcaatattaactaggtcaaggccgggcgcgtaatcccagcattttgggaggctgaggtgggtggatcacttgaggtcaggagtttgagaccagcctggccaaaatggtgaaaccccgtctgtactaaaaatacaaaaaaattagccagacttggtggcgggcacctgtagtcccagctactcaggaggctgaagcaggagaattgcttgaacccgggaagcagaggttgcagtgagccgagatcgcgccattgcactccagcctgggggacgactccatctcaaaaaaataaataaatattaactaggtcaaggagggcagataggtttcagctctttggcttcttggaacacaggtttgaggaggatgctgaagccacatcagggcttagaaaagtctgtgattgattgattgtcaatatctacagagggcttggaaacaggaggtagcagcactgaaatatttgctctccttgaactttaccatcagcctaaagcagtccattgtctggaacttaaaagaaactcaccactttccacagttcatttagtttgtacattcaaagtgtgtatatgactctagcacattggttatactggatgataccaatttataacaaatgaaattataacattgaaataataagcatggccctcaaaattctttcctctgtcttgcttttctgttttcctttttaaaaaatatttctcgtctactttcctttcatttgacttgagttaaacttctagtggctatcagttgctgtaattgtagcttctcaatatttcgtatatttgtagccactatttctgtatcagaacagatgtctctgccttcagtcagtccagcatatatgactgccagatttaatacttaaaattcaaagtgtaacaccggtaatcccaagactttgggaggctgcggcaggtggatcacctgaagtcaggagttcaagaccagcctaaccaacatggcaaaaccccatctctactaaaaatacaaaaatcagctgggcatggtggtgtgtgcctgtaatcccaactactaggggggttgaggcaggaggatcgcttgaacccgggaggcggaggttgcagtgagccgagattgtgccactgcactgcagcctgagcaacagagcaagatgccatctcaaaaaagaaaaaaaaaaaaaagccgggtgcggtggctaacgcctgtaatcccagcactttgggaggccgaggcgggtggatcacaaggtcaggagatcgagaccatcctggctagcacggtgaaaccctgtctctactaaaaatacaaaaaattagccaggcgtggtggtgggcggctgtagtcccagctacttgggagactgaggcaggagaatggcgtgaacccgggaggcggagcttgcagtgagccgacatcgctctactacactccagcctgggtgacagagcgagactctgtctcaaaaaaaaaaaaaaaatcaaattggattctgctacctctcttcttaaaaaaggtatagtaggccaggcatagtggctcacgcctgtaatcccagcactctgggaagccaaggcaggcggattgcttgagtccaggagttcaagaccagcctgggcaacatagcaaaacctcatctctactaaaaatacaaaaaaattagctgcgagtggtggcacacacctgtagtcccaggtactcaggaggctgcagtaggagaatctcctgagcccaggaggttgaggctgcagtgagctgagatcatgccactgcactccagcttgggcatccagagtgagaccctgtctcaaacaaaacaacaacaacaacaaaagtgtagtgtccaccaggggtggtggctcacacttgcaatctcatcactttgggaggccgaggtgggaagatcacttgaggccaggtgtttgagaccagcctgggcaacataacgagaccttgtctctacaaaataattttaaaacagctgggcatggtggcacatacctgtagtcctagctacttgggaggccaaggtgggaggatcacttagcccgggaggtcaaggctaaagtgagccatgatcatgccaagagagtaagactctgtctctttaaaaaaaaaaaaaaaaaaaagtctagtgtcttcccacccactcctttacctggcatttgaggtattaccagccacttcctccacaaattttttcctgtgagcgttgttcacttcacacaccctggcctccaaaccccgtgcctttttatctgcctttccccttctccccacagcatcctcctcattatccttacagacccactgttgtgttggttttgagtctttcctgatgtctcaagccaagcactgctgtggcttgtctcttgcccactctgaccttcttgaagctgaggaccatatcagattcaatttggtctactcaagatctagctctgaacatggtgggtacctaagaaatatttgctgaataaatagatgttccaggtccttggacattgtgattgagttaatgaggagcccaagcgagaagggcattatggaaaatctgcaggtgcactggcgccagtccctgccttgtcaccccagcaatctcttttttgttatgactctttcgcctccttgagcagtttgaggggcagtggctgttctgtcccccatctggcccgccctggctcctccggcatgtggtgcactgggagtaccaaggaaagtcccgccccaccctccccatggaacctaaacccacctggctggcgtcctagcttgggggcccttcatcagatctacagtctacattttgttctcatctgccacccatttgttttgttgccacagacttggggacagagagcgtcagtggcaccctcagttcactccagcaatgtaatccccgtgacggctttgacatgtttgcccagacgagaggaaactccttggctgagcagcgcaagacgtatgtggggccccttttagtggctctctaaagatattggggggattgacccatgcctggtcacaggccagcacaaaaaggcatttatttaccatgtccaggactgccaggaactttaaagcatggctgtaaggacttggcattagatgcagatactgaataaataccaactgcccacctcctcccccacccccccaaacacacacacactctcctgcccttggggttgattggagtgtgatttctcctgtcagttgtaagagacagcttttctcttttctccccatgctgctgctgctgcagacaccaccctgcctggcccctcatccacaggagaagcttggaagcaggagggtgcagccatgcagggtgaacccattccttacagcgagattttcctgactaaaataagtggtcagagcagaggctcctctgatagcagctctggctaggatgagccatctggaattcagggagttgattccaaaagagagaatctcctacatctcagggaggcactgtacatgttttgagctttctgttcagcctaaaggcgggtgaaacacactttttcccacctttcccagggacccagcatcttggtgcactcagcaccctgagtcctgcttggggctcagtagggtaagcagaaacccaaggtcccatgtacccttcaccaccaaaggttgattgtaaaacagatatagctaaaggagtcggagagtggaggaagacctcccataatcagtgacaggcccgggtcccagagaccaccttccctgtcaaatgccactgaggctgctgctaataaaataagaattaatgttactttgtgtttatctagtcttccctctgaggagtattagggcactttggacattcagcttcagagatgctcagtattgttactcaagagagggatgttgaggtgcacaaaatctgagatcgcagagattagtggctcagcctgagctaggacccaggcctcctagcatccactgcagggagacagacaacatgagcccttagcctctgctcaatgtcaaggtttcaggaaatgtttttccaaggacatctgaggaaggaccataggatagaagtgattacaggccactaccccatccctccatgaccactggaggaaaatgaactctgcttgtgctgcttcttcatctccagggtaacctatgaggatcctcaggctgtcggaggacttgcttctgcactagacaatcgaaaacagagttcagaaggggtaggtctttaaccctgtttttctgcctggagtcttctggagggaaagtcaggtggtttggcaaagctggctgggtaattcagcagaaactggcttgcacagggggcagggacaccctgggggagagacccacgggggacaccccgtggaacccaggtagtgcctcattgagtcttcacctcaccccgtgagatgaggccacacatgagcttcccaatccacccaagagaaaacagtcccaggcaggtgggagacaggctgagacacccagagagcagacagcaagctggggttccaatcctaggattagtgtccatttccagaacccctgctgttcctaccacagtggccccaagttctccaggcacaagtctcctatggtcacctgttacagtgccacagggtggtcagtgctctgataaaaccatggcctgcaccaggaaggacaatgctgacccgagccacatctctgatggccatttgtcactggcctagcagagcagtaccaaccccattagaaggcactcgagagccagggtttgtttacagagctggtgcagttgggtggtggctgggagggtgtcctgtggcggtgagggggtgcggcacagtgaagtggagggaatggtatgtgtttgggcctccccaaacataaccatgctttctgtacaatttcggattactgaaggggaaagaatgtgtgtcttaatgcttctcatgagatttttgtttttgcctaacaaagaaatgtgtatgaatgcacgtctgtttgcaggggcagggaggaggagggtccttggaatagctgccgacaacagctggaactcctgtctgggtcccccagctgggctagagagggcagtgatcatctgtccactggacaggaaggtttgcaaagggctgtttgcttactgggtcccaatttttagccttctgaagcccctgtccaatgggcccaggcaggcagcagtgctggtttccacgggatgctccttcttgggggaagggactcactccctcatccatgctggtcttcacctggtggatctgagggcatgcatccctctgcactggtcaccagagggcgcagaagagccagctggctgccttgggtcctcagtgccgtgcctttccacaggagtgggcagtgccacctgaacccctgagactgggacactcaaaatcaatgcagtgctcatggctctgattctcccattacttagaatgtcctcccacctgccccagcgtgggcattagagagcccagccaggggcctaccaggatactgcctggtgaggacatcccctcctcgtggccaaccctggcctgcactgggagcagccctgttgtgcccctatgaggctgacctcatttgtccctcactctgggtccaggacctgccttgtccatgccagggtgtgtcctgctgcacccctgccattatcagcgcccaggcctgggtctgagcccaggagatgtgagtgacttcccgcccttcaccctttgtgtgtgtggcttggactagctccctgttttcaaaggtcctgatgactccagcaggttttccacccagcagtaggcagattgctttttttgagatggagtctcgctctggcgcccaggttggggtgcagtggcgcgatcttggctcactgcagctttcctctcccaggttcaagcgattgtcctgcctcagcctcctgagtagctggtattacaggtgcccaccaccacagccggctaatttttgtgtttttactagagacagggtttcactatattggccaggtcggtctcgaactcctgacctcaggcactctgcccgtcttggcctcccaaagtgccgggattacagatgtgagccaccatgcccggccatcagattgcttttcatgtttgctgctccatggggcaatgccatggccacagccttagcgatacagggcagcagagcatgtgggctgtgtgtgtctgtgtgtgtctacacatattcttgcccacctgcagcatttcaggttaccttgtcccatcccaagccatgctgacctcgaaatgaaaacgaggccaagggagaaattaagaacacaataaaaaaggggaaggctgggcacagtggctcatgcctgtaatctcagcactttgggaggccgaggcgggcggatcacgtgaggtcggaagttcgagaccagcctgaccaacatggagaaaccccatctctactaaaaatacaaaattagctgggcatggtggcacatgcctgtaatcccagctactcaggaggctggggtaggagaatcgcttgaacccaaaggcggacgttgcagtgagccgacatcatgccattgcactcgggcctgggcaagaagagtgaaactccgtctcaaaaataaataaaataaaatgaatgggagaaaatcgtgtagccgcacctctacaaatcaaatccaaccaagtcagtcaagaaaaggtcatcccagggctgggcgcagtggctcacgcctgtaatcccagcactttgggaggccgaggtgggagttcaagaacagcctggccaagatggtgaaaccctgtctctaataaaaatgcaaaaattagggccgggcacaatggctcacgcctgtaatcccagcactttgagaggctgaggtgggtggatcacgaggtcaggagattgagaccgtcctggccaacatggtgaaaccccatctctactaaaaatacaaaaattagctgggcgtggcagcgcatgcttgtaatcccagctacttgggaggctgaggcaggcgaattgcttgaacccaggaggtagaggttgcagtgagccaagatcgtgccactgcattccagcctggcgacagagctagactccatctcaaaaaaacagaaacaaaaattagccaggtgtggtggcaggtacctgtaatcccagccacttgggaggctgagacagagaattgcttgaatccaggaggcggaggttgcagtgagccgagatcgcaccactgcactccaggctgggtgacagagcaagactccatctcaaaaagagaaaaagaaaaagtcattctagctactcaggaggctgaggcggaaggatcacttgcgcccaggagtttttgagaccagtccgggcaacacagtgagacctcatctcaaataaatattttaaaaggcaataatacacctaaatttagtattcaagagtttagaaaaagaatacacatgccactagaaaagagaaaaaaaaaatgtaggaaaaagaaaaaagtagaattgcttttgtaaaagctggttctttgaaaagttgaccccctcccaaccctgatagccgtaattgagagaagcggctctggtcaaccttctgtgatctcctggagattttccaagggcacgggagtagttggcatgagtatgtgttatcctgttgggattcttggttactaaacttttcttcttttttccaggcaggtaagggggacgtgctggggtggaggttgggagcagggcatcacatttccttacgtggcaaaggatcacgtctgaagagtgacttttctgtttccacaatatgtgctattgacttctttctcatgggtcttgctgtgacttttctttctgagacttttctgtcctcggcccagaagagaggtagaggtggggagtctgacctggagcccatagacagctggcttataacccaaggaatggtgaggagtcaccagccgagccaagcctgctgtccaccccagcccctacctgtgtaacagctcatgtcttcctcttgtgacctgccgagcctttgtgaatcagacagtacaaggccacacgctttctttctggcaggggtgccaaatttcccctcctatttttgcataatctctgtaagccacagattcccagtcccaaaaatacctccctgtccccaggccttaagagtctgggacattagcagggatgaggagagggtcctttccttccttttactgtctccggagctccgagcagtattcacttttccaggatgagcacaagttactgtggcttttgcttgggagggaacaattctaagggaacagactcaaagcatctgaccagtcagggaagccctctgtagcccagtgcctgtgaatttggcagtcctaggcttgacagatttttataatatagttgcttatatccactaagtccgtcaaaatgatttgaaacctcttgaagaatacacaggccgggtgcagtggctcacgcctgtaatcccagcactttgggaggctgaggcaggcagatcacgaggtcaggagatcgagacccttctggccaacatggtgaaaccctgtctctactaaaaatacaaaaattagctgggtgtggtggcatgtgcctgtaatcccaactacttgggaggctgaagcaggagaatcgcttgaacctgggaggcagagattgtagtgagctgagattgcaccactgcactccagcctggtgatagagtgagactccctctcaaaaaaataaaaaaataaacacagtagaaacagagtaaaaagaaaacaaagcccaggggagttcaatgttgtaaacacagttggttctcatgtagcagagctttcctggcccacagacctgcaagggtctctcctgccttgtctgttcaggtggcctgagcctggtgcatggagagagggtcagctcatctcaggctgtatgtcttgggatgaccatttcacctctagcagagcccaaagctgtggtacatgtgatggagcctgagctggagagaatgcagagaaggaaagatgatgaaagcagtgcaaacatgtgcctctccctccaggtggggtggggtgagaggaatacataactgcccatagtgtgctatgctaggctgtggccagaggaaaggccagcaggtcctagactgcaagcagcacagggtccacctgcttgagcaaagcgtgaccagtgagtaggaacttgggccatgcaggatcacccagagccgtgggagcaaggggcatctgcctgccacccagcttgggctggtgccctctgcacagctctgctgtcagcctgggcaggtctcctgccacctctcatagtagcagcatactgctgctctgcgtgagaaggcagttcctccactagaccccaagcccattcttagagagatgtgctggcccaggcctctcatttgcttcttcagggacaggctggcctctggcccacatgtcaggggcctttgcagcagggcttctggaaaccatgtccattcattgggaagatccagcccacatgcccttgtgcctattaatcctgcaaaaaaggatactgcccacacaaactcccctgagggtggccttggcagctggtggtggtgcctgtctctgcccacacagactgcctcgccactgccaggtcccacgtagagctccagtctctaacttcccagaaacaaacctaactaacagctaacctggtgtcttgcctgactgactgcagtttgtttttttttttttctttacaacaaatattaattgctttgccttatttcccatagtgtagaaaccttgagtcttttcaagcctcctgagtacaaattctttacttggaaactttttgtactattgagtgagatcaaaggcttttagacttggtcccagtggggtggtgcttgaagtgacataggaagggattcacagcttctctggaaatagtacacctgagctacagaaattgttcttgttacattgaaaactggacaggtgggtttccttgtgggcatggggctgtgggaagctgcagaggagcatctgttggaacccttatgctcctgggactcaggtgtgtggatagccaacacagaagttaactgacaccaccaggcttattactggttgaagagaaatgagacttgtcaatgggctagggccgggcggctctcagggagactgctaggcttgtgctctccctccctggcctctctagtgtgaggtctttttgcctctcttggctggtgatcagctaggggtgtctcccttttgcagggtgcagccaggaaaatatcctcatgtgagagaatctaagtcaaaacaagaacagaggtaggttagtaaagaatgctgctgccaaaacccaggcttgggtttggagggcgggactccctcctcagacctggaggcccccaaggctcttactctggaaggataatcctaacccctggagtaccagacagacatgcctctcccccttgggcaggcaaccctccctcctgatccctgaggcagagctgcccctgcctgcagttccaagtgagaatcagctgacagcaggatggctcacctgccactcagatcaaaacctgtggcttctgacatccaagatgtctgtggactttgaaaatgggcagggctggtctaaccactgcctcagccaagccagcctggcctacctatcttcagaggggctgagcttcaggcagcagtctctattggagggcattcctctgctagcttccttccttttctctcttcacatgtcttcttcctttctgtccctctcttccaactcatacgcttcttcagatccctcagaccagccttcagcttggatcattgcccaagaaaatgctgaaactatggcatgtcaggctgggtgcagtggctcacatctgtaatcccagcactttgggaggccaagctgggcagatcatttgaggccaggagtttgagatcagcctggccaacatggcaaaaccctgtctctactaaaaatacaaaaaaaaaaaaaattaggcaggtgtggtggctcacgcctgtaatcccagctactcaggaggctgaggcacaaggattatctgaacctgggaagcagaggtcgcagtgagctgagatcgcaccactgcacaccagcctgggcaacagagcaagactctgtctctaaataaattaattaattaaataaataactaaataaataaataaaaataaaaataaaactatgacacatcagagccaacagccttcttaggaatctgctgggccagcccctagtctgacagatgaggataccgaggcctcctaagggcctggtgtcttgcccaaagctgcagggaagaaacagagtcccctaagactcagcgcagtgccccctgctccaaccagggccccacttccctcccatcagcctgacaaggagcgcgtcctcggcctcccacagtttctttggttcatattttccaagcagtgtacatgtttagtctgagtctgatagcacctacattattagaaggaactttgccctgttataatactcaaggcatttatttaccaggacaagaggtttagatagctaaggttttgtgtctggccacaagaaagtcaatttaagcttacgttatataagcttaactgttaaccatcaccctgctccaccatggttcacgccctgaggccaagtggcttctatattgtaatgagtcagtttccataatttctgacatccctgggtttctgaattagaaaacagaagcaccaacctgaaagttaaggtttctgagtcataagaattgaaagccaaatacaatctagcaatcgccttatttcacagatgaggaaattgaggccaagcattgctcaggcctctgtcccctgctcctgcctctccacccaaatctctaaggcttcttaggatagaagaaactcaggagctctccggtgaagaaagtggggtccagagaggagcgactcaccccaggtcctgccaccagtgagtgtgagggcccagatggaccccacccagtgcactctcctcagcgtgccctctagggcttggtctggaggatgccattccataaacatactacttatttggaaaaatctaggacatggaagaaaagggttcccatgagccagcttttgggaagttatttttgaggaggtgaggaatttcttaagtgtcattgtttattttctgagcatgttggctctcaagatttatccccaaagaagaaaattaaagtatgaccccaggcctcaagggatttgttctttagcagcaacaaaacaattacaagaaaaatctgaaggtttaaggcccctgaccccttaatgtctttgttgtagcttttgcaacacattggaaagctcaggacatctagtctgtttctgctaagtggacaaaagctggtcaggtgtaaagaaagggctggtgcacactctaaccgctagtgtgggactattttctctctggagatgctgctgactttctaagcttcagttttggggactcagcatggcatgcgtcctcccagaggccacacattctgacttacagtcattgagagcatgataactggtgtgtcctgttccaggaatgtctcaaggcagaaggcctgccagcaagcacagagtagcagtgtaccctactgccttttgatgggcaagggcaaggaagtgccagccttaggcattgttaacacatctgtcagtcatttgtgcgtccatccccccagtgaggacccacatgcctcctgtccctaggtttcatgtctgggtgataagactccctgataccttttcaattcaatgttcttttttttttttttttttttttttttagacagagtttcagtcttgttgcccagggtggagtgcaatggcgtgatctcggctcactgcaacctctgcctcccaggttcaagtgattctcctgcctcagcctccccagtagctgggactacaggcgcataccaccacacccaactaattttgtatttttagtagagactgggtttctccctgttggtcaggctggtctcaaactcttgacctcaggtgatctgcccgcctcggcctcccaaagtgctgggattacaggcatgagccaccgtgccctgctcaattcaacattcttaactccccagtaagtcaaagaaataatgagcaacacagactcttcctaatctgatcagtgactggcttgggcctttctgaaagtgctcttgtgggcttcccacattgggtccgaagttaggacacagagcacattcctcagagcaaggggccagctgagctcactgagggagtgaagagctctggtggcatcgtagatacctgctcagagtgctggactctacctgggaccccaaaccaccctcccccaccatcagcagcaggtgtcaacccccaggactggagttgtcacatcactgctggtgatatgtgttctttgttctttttctttgtgaaggtcgtgttattttttacatttgatagacactggggtatgcattccttttactgcttatttttactttagtcttaccctagatcatggcattgggtgaagccagctatagacagagctggcatttttgtaatagaaataggggtcttgcaagtgagccccggaagggtacctcccagagccagggtaggtgaggaggtgattaagggtcatcacctcatttctctaggctgggagccaacattccattaacatggcttctagggagcttcttatcatgtcatatttgatggcaacttaaacctttttagccatgtgcatttttcagagtctctgtccctgaggtgcttggcacaggggcccaagcaaggtgactgctcaggcaaccccgtggtacaccttagtatgcctggaagctgtcacctccctggctctggctgctgcgccccagtgctcagctgaacttggtttctttgactcctgaagcacagccagccattgaacacagggaagaaaggacgagactaaagggagctgttgctttcagggctgcttcatgaatttcccctaaagagacacaaagaagactaaagccccatagtcccctttgtcatcagagccctcgtttttgctgtgtttctgttgatggtaaaatgtgcctgcctctgtctaccaggccacacccagcccagcggagcacgcacctcctccagttcccctctccactcagaaatgcaccaggacgcatttcaaaatctcttcagcggagcaaacagaccccctgcatccccccggggctggtgctgccctgccctctgagcacctgtaccccgctctgggcaggctgtcacttggccttccctgggttgggcttgacagcggactgtcatagtggctgagttcaaaatcagcctgcgtggcagcgccttcctgaagttagaaggtgttttgcagccccgggctgagaggccccgcaatgtgagagtggacactcatagtcaaaaagttctccatttcaagaacgcgtacagccaccttccttaccgccggccctgccgggagcctgcttcttatcatttgcacctcattgctttcctcacctgccatctcacacgtggctgccctgtgttgcccctgtgtgctgtgccaattgtgtttttttgctctgtgtacattttggttttatttggggttgctgttgatgatttcctttgttccggtgttctgtctcccctcgctggctgtgtgggggctgcctggcccgctgcttgccgcctccatagatccccgttgcgcagccatctgtcatggacgacattgaggtgtggctcaggaccgacctggtgagactcgacttttctatttcatctgtggggtgtggagcggcagaggctcttctgaggacaggccttgggggagcatcagcaggggctccacccctgtctgggtcagtggagaagggaggtctgggcaagctccatagctgcccctcctccccgacatcagcccatagctgtgggtgctgcagtggcctcccggcctgcggaggccaactgtgctgggggcaaggccttgggcacagcctccttcacccacacagtcctagccgtagctggctccaaaacacacacttgccttccccccagtatcttttccatttcagatgtatgtgccgtgctttggttttttgggggagggagtgttgggggagcatgttttttgttttgttttgttttgttttcatttcttttttttttaattgtgaagtatacacacagtgcttttgtttttaattggctgtcatccccctcctcccttcctgatttttgatgtaaaagaacccctgccccaaagacccattgtctccatcctcagagatagggctagaagatgaggatactatgcatctgaaaatggcaacaggtcccaagaaaggagagctgcagtggctgcatgtgataactgctggcccctccctctgttctttacaaagcactttcactctcagcagcccagtagggggccagggtggcggatgaagaagtgcactctgggaagtggcttgcccagagtcatggggtagttggattctcccccagagctggagacacctcatctccctcctaggtgcctcctctgtagggggccttgtccccaggcagaagagcctgttgagttctttaaccacagggtcagcctggctgtctgtgggctggtgacctggctacctcccacaccaggacagcaggcctcaggttggggcctctggctgctctgggcctcctccccagaaggtcagctttccaaacacatgccttgccaaagaaggcagctgcctgggtgtcagggaggaagaacacaccccgggacatctttcccaaggggctgtctcgaaaagaaattgcttctctcacagaagcaaggcaggaaggaccaaggtccttaacttctaagggggaccccagggtccagacagggaggggatgtgtccagtaaggctacatagcaggtcagtggtagagtcaggaaggaacccaggtctcctagcccagcccagggctttgtcacttccccatcctgccccttcccaatgaggccctgcacatgctgctcttccccagtccccagggaaccccatgagctcaagacactaccatgttctccaaacaaaatcaagtctgatgcactttaatttttgagtgcacagagcctccatggctccttgaggagccagcagcagataatataatctgggccacgggaggaggctggtgcagctcccaggaggctgcaggacatggcttctggaggcacagcctccactcccaaagtacctactgagtgacaggccctgtgctgtgggctttgtggccctgagccatcaaggcctcatgcggtttccagctattggtgtcaacagcgtcttcccagaaaccctgtggctggcagtgagtgggtgttgtgttgggcacacgtgaccctgtgtgtgctcaggctcagccccctgtggctactgctctgtgcctctccctagagcctcaagagtgccaaaggtggggtcccgccctctgcagcccaggctggagaaccagcctgcaccgtttttggagttttctttccagcctttctggaggatcaaaacctaaaacatgtttgaattttttgcttttgttttttaaaaacaaagcttctgtttctccaataagaagagcagtattttactattacagaaatctggaaacagggaaaattaggaagttttgttcaggctaccctgggcagtgctgtcctagggtggccatgggcagacagaggtggctgggcgggcagtgcttggaccagtgccctaatttcattttctctgctcctcccacagaagggtgatgatctggaggagggtgtcacaagtgaaggtatggcctggccagtggccttacagcccccttttgttgcctctgtgcaggctgcacaggagccagcccccatcatcttggagcccccgctgccagagcacctactggtgccaggccctgagccatgggcttcacgggtggctttgtcccacccaggtcttacgctgatttgggaagtgtgatttatctcgcttattgggaaacaggtcagaaagaacatgtcaattccacaaagttgcagagctggtgaatagcgggtgcagattgccacctggtcctgacccacaggtgctcagcccagctcagacacgcagtttgtggaggtgcgcagcagcacccttgggccactgagccagaagggaggagcctctcctgggcctcagctgatgggctggatgggagcagcggggtcttagttctcccacatggccacccccacatcccctgcccttcacatcctgcctccccaagctcatcttgccccactccatctgcctctccgtgctcctgtcctcctctccccaggtctgccagaccctgtggccagaccgctccgcagggagggaaacttcagaggaccctgctccctagctctcagtgcccatagaaatggggcactcccccctccccactgcattcctcagcatctcctcagtcctccattggtgggcaagggtggggtaggtgggatggttcctgcctgtttaatcagaagctggcccctccagcttaccctgccccacccccagtgctgatctggaaaatggacaaaacccagtgctgatctggaaaatggtcagcggtagggtgagcactctgggctgtgttttccagagcctttccctccagggcaggaggactgggcacagccaggagcctccccccacactgcagctcacgaacccctccctacccacctgctcctaggtgggcttcatgcctgccctagaggaggaaacgggctggggagtggaagggtgcgcttcctctggtggcctgccctcaccaaccctgacccttgccttggtttgtattgcagagtttgataaattccttgaagaaagagccaaagctgctgaaatggttcccgacctcccctcgccccccatggaggctcctgccccagcctcaaacccttctggccggaagaagccagagcggtcagaggatgccctcttcgccctgtgagcagctctgtggtttgcctccccagatggcgggtccccgctcgcaccccgtggacaccgggcactggccactcctacatccccagctccacacggcctgcacacctgtgtttccatggaaatgccaccgtgtctgctcccaggcctcccactagtcaggaccagcttcagccacttcttttctctgagtggtgggacaactgcagccagagactctctcccctcccaccatgggcccctctgcccatgtttcctcccaggaagagcgggcagagtggcccagccccaggcagtgcttcctgagcagaccacccggactgtctttcctccacccgcccatggagaaagagcacgcccggccccgccctgtgctcacctctgcctggctcagcgaccttctcaggcattctgccctcctgggcccctctctccctgaaggggctttgtggcatctctggaagagcagggtgtgctgcactcatgggcctggtctcactccttggacttgtcaccttgtgacatttggcttatcagcatttgagaaggctctgctgggtctccatggtgggggtctctcaccttcttgaccctctctccatcattcagctgccagcccaggcttcacacccaagctggctcagcagccgagcctggcaccgagggtccctgcaggctccctgggcagggagagggccaaggacaattgggagggcagcaggcagcccgcagatggtggccatgtggcacgctgctgagacgacactaccaataaaccaaactgccacgcacacactgcaggctcacacccgcacacctggtcctggcttgtggagggacttgcactggaggtattgctctggcttgcctggggaagtgtcacagatgtgcacatgggccacactcagtgctgtggcctggcctgccgtagcctcacacatctgcctcaagagccagcagcaaacagctttgtggcatccttggaggttcccagtgactgagaggcctgggcagcactaaggcccctgctctgctccctggcataggccttggcctccttgcacagactctcctgacagtctggcctcctcccacctcagaggtcctctggccaccaatttatactctctccccaagctgatcctgaaggcaggcagagcagctaggggctggtaacatgtattcccatcccgtgtcctcactggtgtgtctcctggccatgggcaagggactcgggtcatcccaggccctggtccagccagacacctggccccacacctcccaccaggctgctgttgctcagaaggagaatactgcagctgtatgcatccccgtgtgtcttgggcccagctcgctgggtcagtctgctcctgtcccctccagcatgcactgcctaggtcagcacaggttcctgatccatggtgtagttagcccttcccacctggcaggacggcccagaccaccagccaagcagggaaagggggctgggcttgacgggagaagagaccagcgacatggtcgttggggagcattcaggatggcgacttcagctgggggtcatgctgagcaccaacaggaactattccagtgaagagcaagtgctgcccgacccaggaccctgtgccaggctagcagccctccagctccctccagagaggaaacctctgtctggctgagggtgggactagctgggatgtctcactccagttgctcaggttcacccaggaagctcctccgtggagtggccagcctgattctagccctgtcctctctggcagcacatgccacacctgcctgggccttctgctccctgatgcttgatgagcccctgcctcctcaatgtttctcaaagacagacccccctgaggccagcttgaatgtgaagactgctgaagttagctggcttcacttgagctgcagaaaaggtggctgggatggcccaggtgcacccagaggccccagccctttggctgcctttgggttgtgacttgggttgtctctgaggccctgccagagctgggcctgcgggtggtgggcggtccgacctcgggcagtcagtgctccgcagcctcagcactgcatcccagacccagtgtcctcagagggaagagccagcctccctgcctcatggaaccaggagtcccaaaaagtcaggagcctggaggctctgaaaggagcagggattccatagtgcgtgaagctgaaataggcgccctcctggggagcccccagcaaaactgtttttcatacccactcccagaactgccccgctccagctccagcgccagcgccagctggttgccaggcatcattggagaggcctggctgccccaggggcagcagggagtggtggacctgtatgggctggcaggaggccattggccatgctgacaagtgtcacctgccttcctagcctggagccacccctcaggtggcctgcttgcacctcctatccggaggtagcctgccccacctgtaggcagagggggctcttgcttgaggcctgcacaggaagcaagtatagccccggtgccccagagtgggttccacttagccctggcgagatggcctgtcctgagatctctgctcccagaccccaccatctggggagcacagtccttaggctgcctggtccaggaagggggtgcggctctgtcaggaaacctggactctcaaggcccaccagcctctccgtgagtgttagaaatcacagatacagtatatacttaattacactaaattattgctgggattccttataagcactaattatacctgattataggttaaaatatttattttgtcaaaatattttcttgggaatgtgtttaaccctttctgcgttcattgttgctgagatgtgaaaactaaccattccctcctgcctacctttttggccactgggcggcagagaatggcgctatgtgcagttgggcccctggcaccatgggcctttggcctgcctgctgcagagtagccctgcctgggcagtctccaggcactgagcaggccatctgtggccaggctgagagaatgactggctcgcttaccagcgtgcatgggacaaggagctttggagcctcaaggggttgttgctggcctgggctagagggaaaggtgaccatccgtctgtcctcctgtctttctattagcgcctccatgtgagtgatggtgccttggttcactagccttcccccaccaccccaccatgccacctggtggtcttggggcctgtgctgtcactccagcccctggggaggagaggacccagcccggagagttggggcaagggctccacatggcccaagggcaacagatgctcgcagggcagctgctgccgatgctcacgctcctgcccccctccttcccgctgccacaccccaccctgggcccccgcagacacgcatctctaactcagttgggcccagccttctggatggcttggggtaggccatgggcccacctggggccaggccagcccctggggcagctctggaagagcagtgtggaggagcacttgcttgcagcctggcttcagcctctggcactgctggagtggtccctgggagcttctgcactgtcggctttggggacgtctcacccacttgggttacagtaggccttccccacccagagagaagtgtttccaccccagagacattgtctgtcagcccctgaagtgctcgcctcccccagtgcccgtcaccagcccttcctatctgtggggtccaagtcaggcttcccctgcggccaccagccatagggagcagccatcagcccccgagtcagaactgcttctgtctgtccatacctccaggctctcccggagagggggacggatatttatttcctaaagtttgcacttaattgtgaggattctcaggattgttgggggctactgaaaagaggaatgtgttgaatgtcgcgtttgctgtccactcgtcctagaagtttagtgtttttgtcactgtcatgtgtttctgtgggcagagctggttctggagggtgggtcagtgcacccgaggctcagagcatccatccaccccactggccctccttccagataccctctctctaattgggttcttgcatgtaaaatactccacaataaataaataattgaacaaatta

SEQ ID NO: 10 - protein, 457 aa, Homo sapiens
MEFLLGNPFSTPVGQCLEKATDGSLQSEDWTLNMEICDIINETEEGPKDAIRALKKRLNGNRNYREVMLALTAWADAFRSSPDLTGVVHIYEELKRKGVEFPMADLDALSPIHTPQRSVPEVDPAATMPRSQSQQRTSAGSYSSPPPAPYSAPQAPALSVTGPITANSEQIARLRSELDVVRGNTKVMSEMLTEMVPGQEDSSDLELLQELNRTCRAMQQRIVELISRVSNEEVTEELLHVNDDLNNVFLRYERFERYRSGRSVQNASNGVLNEVTEDNLIDLGPGSPAVVSPMVGNTAPPSSLSSQLAGLDLGTESVSGTLSSLQQCNPRDGFDMFAQTRGNSLAEQRKTVTYEDPQAVGGLASALDNRKQSSEGIPVAQPSVMDDIEVWLRTDLKGDDLEEGVTSEEFDKFLEERAKAAEMVPDLPSPPMEAPAPASNPSGRKKPERSEDALFAL

SEQ ID NO: 11 - DNA, 4545 bp, Homo sapiens
  CDS (95)..(275)
  CDS (1633)..(1778)
  CDS (1984)..(2047)
  CDS (2376)..(2443)
  CDS (2545)..(2655)
  CDS (4072)..(4209)
gggcctgttggacccgcccccggcccacaagcccctgcagggagcgggcccgggcggcgcgcgatcgaggtcgggtcgccgtccagcctgcagcatgagcgcccccagcgcgacccccatcttcgcgcccggcgagaactgcagccccgcgtggggggcggcgcccgcggcctacgacgcagcggacacgcacctgcgcatcctgggcaagccggtgatggagcgctgggagaccccctatatgcacgcgctggccgccgccgcctcctccaaaggtagcccccgcccggcctgcaccgcccccgggggcgcaggggaaactgaggccggggctgccccgacccggggactctgcagcccaccctcccgccggggcgcctctgtctcctcgcctgggaagtggggctgcaggtgggggcacacggaggcgttcacggggagtgcggcaggcgtggggcccgcacacgttaggcaccgcctaagtaccagaaacttcctctccagggggagtgaggccccccgctctccagatggggacctcaaacgtgagacctgggtgaaactgggtggaaccgggtccccagctccctgtctgaggtcgggaggaaggggtcgtgccagggagaggctgcccttctgcctgcctgggagagcagccccgactcgcccggctaagaatagcactcggaaagctgagctcagggagacagctgtccccggggtggccctggcctgcctggcgtcagacgctaagggctgctaagaaaggactccctggccccacacaggccccgtccaggggtcgggcctcagtgttcccaccctgaaaatgggcacgtccagtgtccagtgccaatcaggattgagcggggggcccatgtgtggcccactggggaccagtccttcccctcccagatagtctcaagtccaggtcttgcctggccactcttgcaaatccaactttcggatagagggagggggagagaaaagtaactaacccgagagataagggacccgggacaaacagcgtgggctgggctcaaagtccaaggctctcgcctccccacaggcctggccccaaaagcggccgtcttcggcctccctggctggtcatcctctctctggccgctggccagggcccacgctgttcccgctcaggactactgtgttccgcccgcctctgtccatgctggcccagggtgccctcccgtcctgtggcaaatgtgactcacatagcctagttcagccctgcaccccctcctccaagcagacccccagctcagccctgccctaccctgtgccccctcctccaggaagcctccccagccctgctctgcaccccctcttccagacagcctccccagccctgcatcccctcctcctggcagcctctccagccctgccccgcaccccctcctccaggcagcctccccagcattgccccacaccccctcctccaggcagcctctccagccctgctctgcacgcccccctccaggcagacccccagcccagccctgcgccccctcctccaggcagtctccccagccctgccctgccctgtgcccctcctccaggcagcctcctaagcccgccccacctagtgatgccaggcgccctgtgtctgcccagggggccgggtcctggaggtgggctttggcatggccatcgcagcgtcaaaggtgcaggaggcgcccattgatgagcattggatcatcgagtgcaatgacggcgtcttccagcggctccgggactgggccccacggcagacacacaaggtgcccctctgcccgcaggccctccaggacccccactccttggggtgagggcactgcttcctgggggttgggggcctggggctgtcagaggtggaggaggtggtcttctctctcgggagtccccctggccgctccctttctgcaggtggggagatcctggggacctctctaccctgtcctctctttttcttttcccctctgcaaggtcatccccttgaaaggcctgtgggaggatgtggcacccaccctgcctgacggtcactttgatggtgaggggtgaggggacgtatcacagggtgggcctccccagctccaatgcagcccctcctttgcttgtgggggtccctctgatgtgcactggggggacagagcccaagtgggtgtgggcctggctgtgggatggcggagcaccggggatgggcatgctcacggaggggccctggaggcgatctcggggttctcaagcctgtgtgggagccccacctctacccacggccccgtctcactgcacctccacccgctgggggatgagccgggtgaggctgggtgaggcgctgagcccggccctgaccgcgtgggcttctgttctccgtgcagggatcctgtacgacacgtacccactctcggaggagacctggcacacacaccagttcaacttcatcaaggtggttctctctgacttgctgggatgcgggaggccctcggggaagcccctctgcccacacccccacctccgtcctgaccactggccactccccttccacagaaccacgcctttcgcctgctgaagccggggggcgtcctcacctactgcaacctcacctcctggggggagctgatgaagtccaagtactcagacatcaccatcatgtttgaggtgcgcccacctgaagttccccatgggtctccaggaagtgaccttggatgggggtgggaaggggctgctggagccaccttgctacctggggagggtcccttcctgaccccctgggtgggctggactgtgctggttcatttagaaatcaaagtcctttgcctggcgcagtggctgccaggagcagtggctcaggtctataatcccagcactgtggaaggccgaggtgggcagattgcttgagcctaggagttcaagaccagcctgggctacagagcaagacctcatctttcctaaaaaaaaaaaatacaaaaaactagctgggcgtggtggcgtgtgcctgtactcccagctacttgggaggctgaggtaggaggattgcttgggccccaggggcagaggttgcagtgagcccagatcgaaccactgcactccagcctgggtaacagagccagaccctgtctcaagaaaaaagaaagaaagaaagaaagaaagaaaatttaaaaaaaaaatggaaatcaggctgggcgtggtggctcacacctgtgatcccggcacttcggaaggccaaggcgggtggatcacttgagcccaggagtttgagcctagcctggccaacatggcagaatcccatctctactaaaaatacaaaagttagccaggcgtggtggcgggcgcctgtaattccagctactcgggaggctgaggcatgagaatcacttgaacatgggaggcggaggttgctgtgagccgagattgcaccgttgtactccagcctgggcaacagaccgagactccatctcaacaaaacaaaaacaaaaaaaatggaaatcaaagtccctcaccagctcaacaacctcccatggctccccagtgccctgtggttcagcctaagccctgcgtgttcccctccctccagctgcctccacctggctgtctttgctggttcagcagtgcttgtctcgctgttccctctgcctggtggaggcggcctatctgagaagggctctatgtggttgccctgggctgctgttgtgagagccggctgggtgcctgtggcccctggggcagcttttcttccaaaatgggaactagtggcctgtgttctttttctggtgtgattctttggctccacccgccacactggcaaggtctggagaactgtggagtaggtgcccgggggtggctcgagtgtggggctggggttccaggacagccgggaagctgctgcccgcactggggagctggagattcccgttcacacctgggcttccagggctgccctgccacgtgcccacgggagctgcagccgcccacccgggccttgccatctgtaaacactcttcaatgaggggtgggcgccagggtgcacgtgacccccatggccctcagaggtgacctggtgccatccccgaccaggagacgcaggtgcccgcgctgctggaggccggcttccggagggagaacatccgtacggaggtgatggcgctggtcccaccggccgactgccgctactacgccttcccacagatgatcacgcccctggtgaccaaaggctgagcccccaccccggcccggccacacccatgccctcctccgtgccttcctggccgggagtccagggtgtcgcaccagccctgggctgatcccagctgtgtgtcaccagaagctttcccggcttctctgtgaggggtcccaccagcccagggctgatcccagctgtgtgtcaccagcagctttcccagcttctctgtgagggtcactgctgcccactgcagggtccctgaggtgaagtaaacgccggcgctgggcttggccagtcggcagtgagcgtgcgactgttacttccagcggctgctccctcacctcccgcccatcccatggacacaggaa

SEQ ID NO: 12 - protein, 236 aa, Homo sapiens
MSAPSATPIFAPGENCSPAWGAAPAAYDAADTHLRILGKPVMERWETPYMHALAAAASSKGGRVLEVGFGMAIAASKVQEAPIDEHWIIECNDGVFQRLRDWAPRQTHKVIPLKGLWEDVAPTLPDGHFDGILYDTYPLSEETWHTHQFNFIKNHAFRLLKPGGVLTYCNLTSWGELMKSKYSDITIMFEETQVPALLEAGFRRENIRTEVMALVPPADCRYYAFPQMITPLVTKG

SEQ ID NO: 13 - DNA, 2038 bp, Homo sapiens
  CDS (166)..(847)
  CDS (1192)..(1339)
  CDS (1430)..(1554)
  CDS (1626)..(1735)
  CDS (1823)..(1993)
cgagagcacgtgtccagaccctagcctgtacgacgctgactctgcccggtcccagaaccaaagccatgccggggtgtggcctctgaccccacgcggaggggacctcgccttgcgggaccccacctggaacccgacctcccagcctcgcagccggcctgagccgccatgcgcgggaagttgctgccgctggccggcctctacctggtgcagggcctgccctacgggctccagtccggcctcctgccagtgctgctgcgtgccggcggcctctcgctgacgcgcgtggggctggccaaggttctgtacgctccgtggctgctcaagctggcttgggccccgctggtggacgcgcagggctcggcgagggcctgggtgacgcgcagcacggcgggcctgggcctggtgtgtgggctgcttgccgggctgccccctcctggagctggccaggccgggctgcccgccgctgtggcggggttgctgctgttgttgaacctgggtgccgccatgcaggatgtggccctggacgcgctggctgtgcagctgctggagccggccgaactggggccgggcaataccgtgcaggtggtcgcgtacaagctgggggccgcgctagctgggggcgcgctgctggcgctgctgcccaccttctcgtggccgcaactctttctgctcctggctgccacctactggctggccgcggccctggcctgggctgcaccagccctgcggcggctcccacagcagcccccttccgagcagcgtccccacaccgcgcaccttctgcgggacgtgctagccgtgccggggaccgtgtggacggcaggctttgtgctcacctacaagctgggtgagtgaggcctcgagccaggcaacagcagttggggcttccgggacagctccaggtgtgtccccaggggcttgcaacccattacagggccacgctctttctggggtatgacctgcaagacttggccctgacatccggggctctgcagctgggccttgtgtcttgtccgcccccagctctagccccatccctgagcgctctctcgggctgccccacttctcccccagtatctgcagctctggaacactgaggagagcagggcaggactgagggcccaggtggggagaagggaggtgggggcagatatggaacctcccgtgctcatgccccccccaccacccaaggtgagcagggtgccagcagcctgtttcctcttctcctgctggaccacggcgtttctgctcccgagttgggactgtggaatggtgtgggtgctgtggtctgctccatcgctggctcctccctgggtgggaccttgctggccaagcactggtgagccctccccagtgtaccctgcccacccacttgtacctgagctgcccccaatccactatactgacccatttcccacccccatcccaggaaactgctgcctctgttgaggtcggtgctgcgcttccgcctcgggggcctagcctgtcagactgccttggtcttccacctggacaccctgggggccagcatggacgctggcacaatcttgagaggtgaggggctggccttgaggaggaagagaggggccaggagcctggggcactgctgacttctgccctcccagggtcagccttgctgagcctatgtctgcagcacttcttgggaggcctggtcaccacagtcaccttcactgggatgatgcgctgcagccagctggcccccagggccctgcaggtgagtagatgtagcagggacacaagagagaccacggggctggggctgtgtgggcctgaccttgaccgtgacccccacccccctcaggccacacactacagccttctggccacgctggagctgctggggaagctgctgctgggcactctggccggaggcctggctgatgggttggggccacatccctgcttcttgctcctgctcatcctctctgcctttcccgttctgtacctggacctagcacccagcacctttctctgagctgagtggctggagtggtcaataaagccacatgtgcctgtg

SEQ ID NO: 14 - protein, 412 aa, Homo sapiens
MRGKLLPLAGLYLVQGLPYGLQSGLLPVLLRAGGLSLTRVGLAKVLYAPWLLKLAWAPLVDAQGSARAWVTRSTAGLGLVCGLLAGLPPPGAGQAGLPAAVAGLLLLLNLGAAMQDVALDALAVQLLEPAELGPGNTVQVVAYKLGAALAGGALLALLPTFSWPQLFLLLAATYWLAAALAWAAPALRRLPQQPPSEQRPHTAHLLRDVLAVPGTVWTAGFVLTYKLGEQGASSLFPLLLLDHGVSAPELGLWNGVGAVVCSIAGSSLGGTLLAKHWKLLPLLRSVLRFRLGGLACQTALVFHLDTLGASMDAGTILRGSALLSLCLQHFLGGLVTTVTFTGMMRCSQLAPRALQATHYSLLATLELLGKLLLGTLAGGLADGLGPHPCFLLLLILSAFPVLYLDLAPSTFL

SEQ ID NO: 15 - DNA, 3724 bp, Homo sapiens
  CDS (30)..(310)
  CDS (1663)..(1777)
cggggcgccgccaccgcttccgccgggccatggggccgcgcgtgctgcagccgccgctgctgctgctcctgctggcgctgctgctggcggcgctgccgtgcggtgccgaagaggcctcgccgctgcgccccgcgcaggtcacgttgtcgccgccgccggccgtgacgaacgggagccagccgggcgcgccacacaacagcacgcacacgcgtccgccgggggcgtcgggctcggcgctgacgcgctccttctacgtgatcctgggcttctgcggcctgaccgcgctctacttcctgatccgggcgtttaggtgcgtcaggcgcacgtgggcgccgtctctcagccttggccaattagcgcgcgcctagtgcgtcacgtgccgggccgcggggtcctcccctccctccctccctccctccctctctccctgttggagtgggcgtgggcggtgctgtgcggggtcgtcacgtggtgtgggcggtgcaggggccacgggactcacccgctctccagcctgcgcctggggttggaggtgcccagcgcgccgcctcttaactcgggggtgacgctgcccgtttcccaggtggggccactgaagccggagcatgccgggcaggggtcaggccctggcggggcgagggggcctccttggctccttgtcgccggatgcccgtcctcgttctcatcttcccgcctgccgccaggcctttccgtggggtcccgatattttcctttctgcttctacccactgaagctggttcgtcgccagggtcggccacgtgcccgccttgggtgctcccacagcccgggaggtgcagctgcgtccccagaccctcgcgggggtctccagctgtaggcagcccctgggcaggaggggcttctgcgtgttcaggccaccccggcttccctggcctgtggctccagtctcctctgggctcctgactacccagtgtggctgcttctcccgggtgggagagacacagcgaggaccttatccctccccatcaccaccctggcaaagtcaagccgctttttattttttataagtttttattgtagcgatggggtctcgccatgttacccgcgctggtctgaactcctgggctcaagtgatcctttttcgttggcctcccaaagtgctggcattatagatgtgagcacctgcactccgccatgctgctttttatgggccctgtgcagagcctcccctgtgctccacacctcttcctgtggaagcacctgctgcgcgctctcccctgcctgtatgccgcgccctccctgcctcccgggctgctggggccaccaggggcttggccctgagacaggcttccattctgttgtctttggcaaagtctcacccctgtgtgagcctcagtcttttcatcagtgcaatgggagtgacatcagcgtgcctctcctggggtcctggcgcaggggagatgggagggcctggtagggcacatgtcttcttactgtcatcgccatgggagtgaatggtaatcacttggcgattaggacatgaaagaagcaggcacagcaaaaccagggaggtctgcagcagggctcggggctccagtagaggacggcaatgagagtcctgagggaaggaggaggcagggttggcggggaggggccactgactatgcctggacctacttccaggttgaagaagcctcagcggaggcgatacggcctcctcgccaacactgaggaccccacggagatggcctcgctggacagcgacgaggagacggtgtttgagtcccggaatctgagatggtgtgcacccttccccagctctggggcctcggtgggcaggctgggctggagactcagcaggaccctggggacttggccaagccatggagtggtccctgcaatcacagctgacagcggtagtcaggccatggccccactgggcagggctcatcccttctcccagcctccatttacaactttttttttttaaacttaaatgtttgtcatttatttatttttgaggtggagtggcgcgatcccaactcactgcaacctccgcctccgggattgaggcgattttcctgccacagcctcccgagtagctgggattacaggcacccgccaccacgcctcgctaattttttgtatttagtagatagagatggggtttcaccatgttggccaggctgggttccagctccttacctcaggtgatccatctgcctgggcttcccaaagagctgggattacaggtgtgagccaccgcacctgacctaagttttgttttgttttgagatggagtttcgctcttgttgcccaggctggagtgcaatggcacgatctctgctcactgcaacctccacctcccaggttcaagcatttctcccatcgcagcctcctgagtagctgggattaaaggtgctcaccactacacccggctaatttttgtagttttagtagagacagggtttcaccatgttggccaggctggcctcgaactcctgacctcaggtgatctgcccgcttcggcctcccaaagtgctgggattacaggtgtgagccaccgtggtcagccttcttgcttttttaaggcaggaaagcggctgcagggcttagggtagtggttgctccatctgggcccctccctgagggatgaggtctaagtcaggtggagaactgactgcaggatgcttctgagcgggcggggtcagggagggcctctccctggtgtaatggggctggcttctggaagagtgtctcaggccgagggaacagcagggagcggccgggctgcgcagatgccgggcgggactggggtaggcctgggcatcgaggcagctgtcaggggttagcagggttctgggcagggaatgatgggtatgttgcgctgcagtgtggctgctggggggaccttggcctgttggggggtggcaggcatggaggctgggagaccaggagactgggcggcctctggggacagctctgactttttgagcccccagggagggaggcactgggatccctccgcatgctctgactccattctgggaacccctcccaggtttcttctacctcctggctgggggccccttcccccggagtgggcagttgcacagggcccaggaggccggggagggaggccagtggggggaggctgggccctggtagaccgaggggcctggacaggctgcctgcccctgcctgacctgggtgagcctctgcccggcagggcgggcccttcactccttccctctcacccttgaccccctgctttcagatgctgagccagggaggcggcccttccagcagccatgagggaaggacaggagatggggcccaccccagtgcccagcaaccccctgctccaccgctcattcccctgctggccccggggctggtctcacccagtgccaacccgagagctccttttggaacctgcacagcccgccgacctgttgccacctgcacccaccgctggaccatgcagcctcgcctcctggatgctgtcccagcctggccgagggtcccaggtgaagactggagggaccccaacagccaccgcccaggacgctgaggctcccttgcctgactgtgacttgtgcctctctcctgcccccgtggggacatggcagcccagagccaaggctgggtgggcaggtgacccaaggaacctttctgggaacaccttctcgccgggctgggaacaataaatgcagccatgtctctgcagctggtgctgacccca

SEQ ID NO: 16 - protein, 132 aa, Homo sapiens
MGPRVLQPPLLLLLLALLLAALPCGAEEASPLRPAQVTLSPPPAVTNGSQPGAPHNSTHTRPPGASGSALTRSFYVILGFCGLTALYFLIRAFRLKKPQRRRYGLLANTEDPTEMASLDSDEETVFESRNLR

SEQ ID NO: 17 - DNA, 118383 bp, Homo sapiens
  CDS (85)..(610)
  CDS (46772)..(46890)
  CDS (47604)..(47748)
  CDS (47924)..(48056)
  CDS (77427)..(77543)
  CDS (80248)..(80362)
  CDS (83266)..(83412)
  CDS (83866)..(83983)
  CDS (85437)..(85711)
  CDS (86405)..(86569)
  CDS (89524)..(89724)
  CDS (100844)..(100976)
  CDS (102420)..(102483)
  CDS (104060)..(104219)
  CDS (105401)..(105750)
  CDS (108277)..(108400)
  CDS (109697)..(109771)
  CDS (111551)..(111703)
  CDS (113300)..(113509)
ctgcggctggggctgggggcggcggcggcggcgacgcgggcggcgggcggcgcggggcggtccggcgggttcaaagaggaaaacatggcggaaaacaaaggcggcggcgaggctgagagcggcggcgggggcagcggcagcgcgccggtaactgccggggccgccgggcccgccgcgcaggaggcggagccgcctctcaccgcggtgctggtggaggaggaggaggaggaaggcggcagggccggcgctgagggcggcgcggccgggcccgacgacgggggggtggccgcggcctcctcgggctcggcccaggctgcttcatctcctgcggcctcagtgggcactggagttgccgggggcgcagtatcgacgccggctccagctccagcctcggctcccgctccgggtccctcggcagggccgcctcctggaccgccagcctcgctcctggacacctgcgccgtgtgtcagcagagcttgcagagccggcgtgaggcggagcccaagctgctgccctgtcttcactccttctgcctgcgctgcctgcccgagccggagcgccagctcagcgtgcccatcccggggggcagcaacggcgacatccagcaaggtgagccggaggccctgcctggcatctgggccgcaagggatttgcgcaaccctagaggagctggggacggaggtgctggggcctggggctgctcggacgggcgccatcccgaggggtctctaaggtgaaagactcgcccctgggacactttccagagaagctggaccgcaagagataaggggagcatgaagggaggggtgccggctgcgagaggctgggggaggggacactggctccgagggagggtttgtgatgtgcggaacccggccgagcgctggttctggagctggcagacccgtacagtgagagaagggggatttgggaaacacgttgtgaggaagcgttttggctgaaagggcccgggccagcgaggtgttgagggagtaggtaagaggtaagggcagtgaagatggattgctttggagggaggggacttggcgtgttcacagataggagagaggaggactatggattaaatggaggtggagagaatatgttggagagcaaggggtccagagaaggcgcctggaagaaaattgtaagatgacatggggaaagagaaactcggaaagtggactgcatggttagggaaaatcctaaggtttggggatgaaggagaaatgaactttgaaggaaattgagagttagggaaagctgggcatgaatttgttttagctaattggccgttaatgagcccctagtgttggggcactgtgctaggattgaataaagtactcaatgaagacttcattcacagtctaacaggagaaacatataacttgcagcagtggaggtgagtcctcagtacaatggttgtggcacaatagaggaaaggtcagggaaatttcacaggaaaggaaatccatgaacaggtttcttgaagaatgagtacctcactgggttggagggtattcagggcacaggacacccttctacatccctggaactaaagactgtgtagggtgattggtggaaattagattggattgatgggctgaaaagataaaggtttcacagtctcttaaactcttgggatccaggtgtaaggacttcagaatattttgggatttttcttttttctggcaaggtctgttatgtgagacttttatcagggtctgagttaactctatcaaacacgttaatgtttctacattgaaacacgtgaatgtcacgctaatgggatagacgataaataacctcccagcattcacagtgggttctgttgcaaaccaatgaaaaaaattaaaatttcaaagcttttgaatttcgggactgtaggtaagcgattgtggagctgcactaaagggcttggaattcatcctgtagagtgtatcctcgacattgtggactgaaggatgttcctggagggctttcatatcaagaggataaaaggatcagatttctgatccagaaagatcacttagggcacttgagggatgagggaaggcaaggctggagacaaggagaccagttaggagaatcctggcggttatctaggaaagaaatcaacatttggaatgggtagtaaaggaatgatatatcaggtattacagaatgaagcattttggtttgggggaacggtagggtttggaaatctactttgccatctcctacttacgacttgggcagatgaccttttcttagcttcagttttctcatttgtgaaatgggaaaaaagtatataacctcatagggttattgagagaatgaagtaagataaaatgtgtaaagtgattagtacgtggtagttactaatgaaatggtagctagtatattaatagtagtaactaatagtggctatgggaatggagggatggggggagtgtattgagattggtgtgagggagacaaacgtagaattccacattttttgtttggtggatggcaatgctattaatacatattcagacactgaagcagggctggggtgagggtgagggctggggtgtagggaggataaaatgttttcagattgggatgttttgggtttctagcattattggtacatgtaggtaagaatgttaagagtaaggctttggttgttggagaagctactaattgttagtaggtgttcagagaataactgctggtggtctgtgcacccatgaccatagtaagacacataggattcagtgttcttgtgggaacctgggttaggtaagagatttagagggaacccagaaatacagattgtgtttgactgatgtggctgagggactgaggttatgaaattggctctctgaaatttatgaaggagagagaataatatgtaaatcccctcttcatttctttatcctttctttttgaaggagggggagtaagtggaagggactaaccaaatgctgtcaatcttaagtaatatttctctctaaccaatatctaaaacaaattgagtctggaatccaccatgtttttgattaaaaaaaatttttttttgagacagtctcgctctgttgctcaggctggagtgcagtggctcgatctcggcttactgcagcctctgcctcccaggttcaagcgattcttgtgcctcagccacccaagtagctgagattgcaggcgcatatcaccacgcctggctaatttttctgtttttagtagagacggggttttgccatactggtcagactggtcttgaactcctggcttcaaatgatctgcctgcctcagcctcccaaagtcctgggattacaggcatgagccactgtgtctagccatccaccgtgtttttagatagtctagaaaataatttgtcagtattaactcctatataccattctgctttgctctttaaaaagatcaagctgtgctggaaagagcactagattgggtgttaggggacatagttcagctctttagctattttacgctaaaggaagttcatactgtttttgtccttcagtttccctttaaaatgtagctgatagtcgtttacttatatctcaccaaggcaaataataaatgtgaaaatgctttgtaactgagaaatgcttcaacaatacaggatattattgatcaacctcagatatcatctctggtctggagatcatagctagtggttttaactcaccatctttttcaagtgattttgaaacaatgatgagtataatgccctcctgcctaactggccttttcctgtttctcttaatacatttattcacaccctctggctgttctttctagatcaacagttctcagagtgtggttcctggatcaacagcatcagcatcatctgtgacattgttaggaatacagattcttgggccgcattccggacctcctgtccagtagtctcgtttaacaagctctccaggtgattctgattcacgcttaagtttgagaaccactgtcttgaatgaagggctctcacttcaaatgtctcctcagactttgacttctcattttaaagtagtcctccaggtcgctctctgatagatcatcttattttctttgtagcacagctaaaatccaaaatgtttatttttgtttacttgcccgtctcactttgcactaggatattgtagactgttcaataaataagttttgtgtaaataagaatcactagagagcttattaaaatgctaacttgggagtttcttcagagactggtttagttgatttggtgatgactccatgtgcctgcatttttaacaggtgccctgtgattttgatgctggtggtaccaccacactttgaggaacacagatttaaatattttgaggagaaagtacaatctgtttaccgttggagtatttgcaaaatcaaaatagataaattagttaatattgaatctcaatagtgagctttttaaagtgtttttgtgattttttggggggtgctttttcaggttgaggcagaacagctatcagtagtgggtatatatacatttatactttatcaataaaaatacagatttgctactcaggaggctgaggcgggaggataacttgaggccaagagttcaagatcagcctgagtaacatagcaagaccctgtctctcaaaaaatctttttttaaataggaatcatattgatgcatctgaacaaactctcagatgaactcttgaaggagatgaggctacctctgagatggcacaatgatgtggctgaagaaatgaattggtattaagttgcattgggttctgctatttttttttttttttttttgagacagttttttactcttgtcacccaggctggagtgcaatggtgcgatctcggctcactgcaacctccacctcctgggttcaagtgattctcctgcctcagcctccccagtagctgatattataggcacccgccaccatgcccacctaattttttgtatttttagtagagacagggtcttgtcatgtaggctaggctggtctcgaactcctgacctcatgtgatccacctgccttggcctcccaaagtgctgggattataggcgtgaggcaccacctggcctcggttctgctgttagttagctacgtaacccttgggcaaggaacctaggaagtctctccaggtcttgcaatacgaagaggctgagttcctatcccgttagttatatgattctattgtcttttatgctaacattctgtatgtacatacgtttaatgtccttatagtttgtggggaggaatagtggaatcaccatggaaaaatcattctgttactgaattcttcaacttactgtggactgggcacagtggctcatgcctgtgatcccagcactttgggaggccgaggcgggcagatcgcttgaggtcaggagttcgagatcagcctggccaacatggcgaaaccctgtctctacaaaaaatacaaaaatttgccaggcgtggtggcaggcacctgtaatcccagctactcgggaggccgaggtaggagaatcacttgagtcttggaggcggaggttgcagtgagctgagatcacgccactgcactccagcctgggggacagagtgagaatccgtctcaaaaacaaaacaaaacgaaacaaaaaaacttactatgaaaagtctgagatggcaacaatcatgtgtaagtgggagggaaaacctctgagtgtagtgtgaagagcacttcctcatagtgtttctgtctgtttatcacagaccatgctgagccactctgaggagtcttctgtttgagccctcggaatttcttgtccctggagtgtgtatactatatgacagttctggcctcagtgtgacttaactggtttggggactttttaggctctactttttctgactctcctcttcaacagaaacaagcttgagtgtttgaatgatcatgtggtactccaccaacaaccagtcattaacgatgtgtccaagattgctgaaatacttctcacaacttctgtctagcattgtggtcaaactacctgaattcatttttgagctctaccatttactactggaatgaccatggataagttacttaacatctgtaaattgggagtaataattacacctacatcatagagtttttgtgagaattaagagagttaatgtgttgcaaggtacatttattgggagcttacatgggaagcccccaataaattgtagtagtgttatttcggtaatttttcatttgtccccccgttgtctttgtgactgtatctcacagcaaacagaaagaagaggcaggggggtaaattgtggttttaaaggcttttctgatgtctactgatatgtacagcatgcatgataaatcatttgagttccaaatcttctagttacctagatcttgtaaaaacttataaactaatgtcctaaatcctaagtctttataatgtctagtatttgtacatcaaaagccctagttaggggactttaattacttttacttttctcatggattctgctgtcagtgggtcctaaatgagaataccttaaagcagtgattctcaaagtgtgggccacagaatgctggggtgggggtgatggtagtgaccgtgtcactgagacccttttagaggtgcacaagtttaaaactattttcataattacactaatttgatattctccttattcactgcgctgacatttatattaatggtgcaaaagcaatgatggataaaactgccatcacctctgcgtgaattaagatggtgagtgactccatttgggaggccgaggtgggtggattgcttgagtccaggagtaggggactagtctaggtaacatgatgaaaccctgtgtctacaaaaaatacaaaaaaattaaataggcatggtagtgcgtgtctgtagtcgcagctactcaggagactgaagtgggagaattgcctgaggcacggagtgtcgaggctgcagtgagccatgattgtgccattgtactccagccttggcaatggcgtgagaccctgtctttaaaaaaataaaaaaaataaaaaaataaaaaaaaaggataatggctccaagccatactataaaagtcattgcatatttactttcacacacttagagaaagaacaaaaataaacctatgtcattgtcacttaatatcctttatgaaacagtaacaattactatattacattttgatctttaaagctctgtgtgatgaagtgggaaatgtgcctaaaatgcttctgctgcggaagaaagtggaagaagagtacttgtgcagttttttgagttccaagctgaatttgctttttttcatagaaaactattttacttgaaactatggttttacttaaaaactatggtttttaggcatgggtatttggcagccattttctcagaagtgaatgaattgagcctgtcatttccaggaaaacaactgacatatgttgccagtgataaaaattgagattttaaatgaaaattagaattttggaaaattggtatttgctgccatgagctggtcagtttctcagtatttaaagactttcctgaagagattggtggtgatattaatgaacgtgaatttttttgatattgtgtaatgtcaacatttcaaagatctgcgtagcttattgcaatatattctaaatgagaaatgcatgatgttaagtgcaaaacagagcaataataaatagattgtattttattttattatttttattttttgagatggagtcttgctttgtcacccacactggagtgcagtggcgcaatcttggctcaccgcgacctccgcctcctgggtttaagcagttctgcctcagcctcccaagtagctgggattacaggcacacgctaccatgcctggctaatttttgtatttttagtagagatggggttttgccatgttggccaggctggtcttgaactcctgacctcagttgatctgcccacctcagcctcccaaagtgttggtattacaggcatgaaccaccactcccagccaataaatagattttaacgcgagagagtagtcaagtttatttttaaggtttgagatgccacattgcaactgatgtttaaaaaataaatattcttcttaagtttttgtgttatatcaaagaaaaatatccacacaatgatctgaaaagggtattaaaatctgcttttcccttttcttagatacttagctgtatgaagccagattttctttatattcttcaaagaaacaacatattgaaacattaaatgcagaagcatatatccagccatattctattaaaccacatgttaaagagatctttaaaatgtatcacaatgacactctttattaatttttttttgttttaggaaatacagttatttctgatttttaaaagtgttgtttaaacctgtcgtgccggacatggtggctcatgcctataatcccagcactttcgaaggctgaggtgggaggatcacttgagcccaggagttcaagaccagcctggggaatatagtgagactccgactccagaaaaaataaaaaaattatccgagtgtggtggtgtgcgcctgtagttccagctactcaggatgctgaggtgggaggatcacttgaggctgggaggttgaggctacagtgaactgcgatcatgccgttgcactccagtctgagtgacagtgagactgtctgagaaaacaaacaaaactagtaataaagtaaacgtcattttaacattttaaaatttaagattcatttttaattcatcttgtaatgaattaaaatatatttaaaacatccatttttattatacatttgatggtcataccccatctaaacaaaagctctttgtgttcctcagtaactaagactgtaagagaggtcctgagaccaggaagtttgagccctgctctgttaaaggacattaagaacatgataatgtctcagagtctttgggccagtaggaagaatgtcagatcataagatagtaggtggcagatttatacatttatagttcttcattttggagtacccataacagttcagaaaaagcctccctttagtaaaatgtaaaaatgaagaaagtacttattaactgaagttaaacttctaaaaataggtcactatagatctactgatttttttcatgtttatgacagtctatctaagccaacttcagagattgggctcaggatggtagataaattaacctctgtctcttctttggccacaaattgcacatctatccctagccatttgactcaaggggaagtgggaaaaagaacaaggatggataaacataaatataccatttttagaaaaatatttaaagcctatgccccagtgatgagtaaatagcatgcactatatggtactaatgagtacatttgaatgcttatatgctatttatgttccttttgtgaattatttgtccatgtgttttatgtttttctttagattgcttacattttttgttttgatttacaagaattcttgacaaattctgtatactgatcctttgttgatgatgtaggttgaagatttattctgagcctatggcttggtgtggtagccagcctctaagatggccccttgttccttttctcctgttattcacaccgttgtatggttgctgtccagttgctcaaggctggtctccgtgaccaagagaatataatagaattaatagtgactttattaaaaagtcattaaagccatatatacagttttttccttgctctttgaatcccttgttctgggtgaaaaacagctgtcattctgtgaaagatactctagtagtcctttaaagaggccatatggagaaaaattgaggtcttctgcaaagacccagcaccaacttgccagctatgtgaaagagccgcttttgaggtagattctctatcctaatcaagctttcagatgactgcagtccttcctggctgacatcttgactgcagccttcttagaggcactaagccagaactgcctgccaagtccctcccaaattctttttttttttttttttttttttgagacggagtctcgctctgtcgcccaggctggagtgcagtggcgggatctcggctcactgcaagctccgcctcccgggttcacgccattctcctgcctcagcctcccaagtagctgggactacaggcgcccgccactacgcccggctaattttttgtatttttagtagagacggggttttaccgtgttagccgggatggtctcgatctcctgacctcgtgatccgcccgcctcggcctcccaaagtgctgggattacaggcgtgagccaccgcgcccggccccaaattcttgtttcaagaaagctgtgagaaataattattgttgttttaagtcattaatttttgaggtaatttgttacatagcaatagataactgatacactttttagagagctgtcttttcatgtttttatattaaaatagtttttcctccttttttttttgctgttcttagtagctttataataataagcagtaagttttgttcattaaggtaatttcactgccctctctacgtataccttggtcatcttcaagattatctcgactgatcttgaccttttgctcctttttttttttttaattaaaaaatttctttttccaagacaaaccttggccattcaccttttgctcactcttatactaaaatgtattatcttgtgaaagttcattttaaaaacttattaagctgtgtgtggtggtacatacctgtagtcccagctactcaggaggctgaggcaggaggatggcttgagcttaggagtttgaagctgtaatgtgctatgattgcacttgggaatagcaactgtactccagcctgggcaacacagagagacgccgccatctctttaaaaaagaacagaaaaacaacgacaacaaaaaacctgtcagtgtttttgttggaattgctttgaatatgtaaatcagtttgggagaaaatgtctttattgtgtctgcctatttatacacatggtatgcctccacattttcttaagtccaaaaatgtttttgagtgtatattttgagacagagtctcactttgttgcccaggctggagtgcaatggcacgatctctgctcactgcaacgtccgactcccaggttcaagcaattctcctgcctcagcctcccaagtagctgggattagaggcgcccgccaccatgtctggctcatttttgaatttttagtagagacaggatttcaccatgttggccaggctggtcttgaacttctgattctgagctcaagtgatctgcctgcctgggcctcccaaagtgctgggattacaggtgtgagccactgtgcccgacctattttttaaatgtctcaggtatactgatttcatatttatatttgataattccattatctgatgttcttgatgtcttattttactgcttgcttctgcctgctcatttgttgtgggtggtgtcctcctgtgttttatagttttagacagtgagcctgttcactagggctttatgaaatctgccagactggttttagggaacaagcctccagagggtattttgcatttgcttctgtcaggtgccaccaacacagaaattactgaagcagacttttagtttactatatcttagtattgtcagatgttgatttagtgtttaccttataggctggcttgtatttagaaattctcagaattatacacaatgtgggtgtggggaaaaaaaaaagggaattctcaggagaaaacttttttccttaccccgaacccagacagtgacagatttcttcatttccatgctgttggtcagatttttttttttttaatttcactgttctttgcttatgcaccctaataactgaggttgtaatcgttcaagtcagttttaggaagatgagtcttgatctaattaatactttacacaggccctaggctcccatgtcttccccattctttgtttacgcccttgtttgtacatcctaaagaagagtcactaagagtataatttctgagcctttgaatttttgaagttttctttattctactcccttcttaaatgatagcttggctggatatgaaattctgggttaaaacttttttcctcagaacttttaaggcatctcttccagtgtcttaaatcagtgttgctgatgctactctgattttactcctttgtacaaccccagttgggtttcatttgtttatttacctcttcttgagatctttttatctttttatgtcttggatctcttcatctatttatcagttgttttgaaatatagtgatatgcttctatttttttttctaaaagtttctaaaagttcattatgctttttcatttagtcttgtaatcttcatttatagtaagagaactttacatttttttcagaaggtccttccccacctcccactcttattgaactattactatttggatgttggctctcctaggttcatattctccgctgtctttttctagtttccttccctttgttttcttgctccactgacattctgaaagatcttcttgtccttgtctctaacccttttatccaatttattaattacattgtacatttcttttttttttgagatggagtctcattctgtcacccagactggatggctcactacaacctctgcctccctgggtcaagcgattcttctacctcagcctgctgaggagctggaactacaggcgcatgccaccacacctggctaatttttttgtatttttagtagagacgagtttcaccatgttggccaggctggtcttgaactcctgacctcaggtgatccacctgccttggcctcccaaagtgctgggattacaggcgtgagccaccgcacctggcctacatggtacatttctaagagcttccttgcttaggttgtatttttataagattctgttctttttctgtggacttaatatcttctttctctgaggatacaaatgtttttcttccccaggcaaaatatgtattttactttatttttcatttgactttttacttttgaaacatttcaggtatactgattccttatttatatttggtaattccattatataacttttttttttttttttttttgagacagagtctcagtctgtcgcccaggctggagtgcagtggtgcgatctcagctcattgcaacctccgctcttggattcaagtgattctcctgcctcagcctctggagtagctggaattatagacgtgtaccactgtgcccagctatcattatataacatttttgacatcttattttactgtttgcttctgcctactcttgtttatcttctattccctttattatctgttttacttttttttttttcttttgatctttgtgtttcataggcttcctcgagcaatagatgatccttggttgtctccccacttgaatgaggcaatacagttctgatggaagattctgtgcttctgtgtggggcctgttaattgttgggcattgctttagatcagggattggcaaactggcccatgaactaaatacagtcaactgtatggttttgtatgacctgtgagccaagaatgatttttatattttaaatagttgggaaaaaagaatattttgtgacacatgaaaattattagaggccaggcagggtggcttacgcctgtaatcccagcactttggaaggccaaagtggacagatcacctgaggtcaggagttggagacaagcctcgccaatgtggtgaaacctcatctctactaaaaatacaaaaaaaaattcgctgggtgtggtgacaggtgcctgtaatctcagctacttgggaggctgaggcaggaaaatctcttgaacccgggaggcagaggttacagtgagccgagattgcgctgttgcactccagcctgggcaataagagcgaaaactccatctcaaagaaaaaaaaattttaagtgtaaatttgtgtttagaaatttttatttgaacacagccacgcacattcatttatgtattgtctttgactactttcatgctataatgggaaaattgagtagttgtgacaaatactgtgtactgctttttggtacattacaaattgcagtgatgcagctataacttgatagggatgtgtatggctgtagcacaacatttaaaatttaaaaaattgtccaaaatattgcatacctatcatttcaaagaagagtgagtggattttaaatgtcatgcttttacagcagagtacattttgttttgagttagatggcaaagcatggtgtttattatgtacttacactatagctgtgctgaaagagtacagtgttttgttgacaactccagagtaagcactgattacattattcccaactcacaggaaagtaaaaatcagaaataagaaagtttaaaatggaatatctgatcacagcagaatttcttaaaaataaaaaatgaaaatgaggctcttcaaacatgggaagtttttgagtggctcattcattagccaaacagggatagctcttcacctgtggtgagttaattaaaattttcccaattaaatgagaattttattcttctcattggtagacctgtattacaaaaaaaattactcaattattatattttgaatttgtagataaaaattgtggaaatttttctttcattatgtaaatacctacatactatccttgatacttttttcctaaacaacctaagttatttactatgccttgtgatgccacatcccatgttttcatttgatgggacatgttaggtgttggttatgaatcagatttcaggcagtgttgtgtgtacagcctgacctgttgtccacaatagatttggaagaatgagaatttacagggttctacttctaacatcacaaatgactgccagaatgaattccacaaatgaattttggaccagtctggcctgtcatccatgtgtggtttattaatagaatgctaaaattcaaattacacaactcatttcttttcccatcactgagggttggcttaaatactatccctcacaaagtaaatacttaagcaaaaagctaatgtcagtcaaaagatccccatcagttttttgtctgccgtagggcagatatgagggtaaggtattgagaatcatttcactgtattactgtgcttatgaatctgaagtattgaaagtaataagagcactgcatttcagctgtccttcgtatattacattttctgctttgtgttgaacattaccttcatttgttgtgaggcatataaaagggatgtatgtaatgaaccttggacccactgaatctcgctggagaggtaagagattatattaaagaacagtataatacattttataataaattagtaataaatttgatttcagtaaaccagatatttgttgaaatatggttcaaaagaattagtcatagctgaaatttactatttctgctcttaatgttggtttggaggtgattccctctttttcatttgtgtattatatgattttagtccttatgcttttggctgtaatctaggctgctcttgacatccatccaattttctcttctctgttttccttcctcaatttatgttgaatgctttcaaagtagattatctgaattaataatggcaggaaagaactagctgtggataagtttatttgaatctgtctagacttctgttccttgtctgtaaaataacatattttgttatgttttatcttacgttaaagataaaactttttcgtgttatcttatttgcctataaaaatcctctcagagggaagactcattctattttgcggaatgaagttttgcccaattaaaaagaattatttcagggtgataatattatccttgtttcttttttaaacaaatgaggccaccgaggtaatgtggtaaaattatacctaaatgtggcctttccatgttaagctgatagcacaaactcagatgccttcaggaactaggaaagtaactagtataagacattgagagtagtgaaacttgcctagccttcttgcatttaaaaaatactctattttggcaggcatgggggctcacacctgtaatcccagcactttgggcggccgagatgagcgaaccacttgaggtcaggagttcaagaccagcctggccaacatggtgaaatcccatctctacctaaaaatacaaaaattagccaggtgtggtggcacatgcctgtaatcccagctacccgggaggctgagtcacgataatcgcttgaacctgggaggtggaggttgcagtgagccgagatggtgccattgcactccagcctgggcaagagagtgagactgcctaacaataacaacaacaacaacaactactctattctggccaaataataccagttaggctgccaattttctgtttttgtcctgacttggtagaatctgattagtcatttttaaggtggatgtaattaatttatagttagtttgatttcataatttttaaaagtttatttaagtacttaagtaaactagcattatagtttaatttgcagatctgtgagaaccggtaaagtccaacatcttttagtacggctgttggcctttgaatatcattttttgtagttgcctgttcgggttgtgcttaccttttcccctgtggtttgtctaccttttttcccagtgcttttgtaggattctttatatattccaatcatgactcttttgtcaggtatatatcctattttatggcttgcctagcagttgtgttttaaaatgttaaatttattttagcttttgagtaaacagtactttcccactggttgaaaagttaaataagtatacgaagctggatattgagaagcctccctcccactccttatcctcatccagttcctgtctcccccaacacataacctgtgttaatactttatctgtccttccagtatatccaagtgatactggacaatggtgccagatccattcagtggcagaaatattggtatcttcaaaaaatgacattgggccaggcatggtggttcatacctgtaatcccagcactttgggagcctgaggcaggaggatcacttgagcctgaagttcaagactcgcttgggcaacatagtgaggccctgtctctaaataaaattaaaaaaaaaaatggcggggtgcagtggctcacacttataatcccaacactttgggaggccaaggtgggcagatcacgaggtcaggagatcgagaccatcctggccaacctggtgaaaccccatctctactaaaaatagaaaaatgagctgggcgtggtggtgcatgcttgtaatcccgctacttgggaggctgaggcaggagaatcgcttgaatcaggaggcggaggttgcagtgagccgagatcgtgccactgcactccagcctggcaacagagcgagactccatctcaaaaaagaaaagccagatgtggttcacgtctgtggtccctggtaggtacttgggaggttgaggcaggattgtttgaacctggggaggttgaggctgcattgacctgtgattgtgtcactgcactgcagtgcactgacagagcaagaccgtgtctcaaaacaaaaaaaggatgttggtacaactggattttcacatgcaaaggaatgaagtcatacccctacttcacaccatatgcaaaagttaactcaaaatatatcaacaggctgggcatggtggcttacgcatgtaatcatagcactttggtaggctgaggtgggagcattgcttggggccaggattttgagatcagcttgggcaacatagtgagatcctgtctctacaaaaacaaaacaaagacaagtaacaacctaaataaagcatgagcaactaaagaaaaaatagtaagtcggacttgatcaaaatgtaaaacttttgtacattgaaggccattattcagaaagtgaaaagaaaacctgcagaatgggagaaagtatttgtaagtcatgtattggatgatagtgaaatatataaagaactctcacagcctgataataaagacaacccaattaaaaatgggcaaaagatctgaatagacagttccccaaagaagatatgtatatatggccaataagcaaatgaaatgatacactagatcgtttgttattaagagaaatgtaaacaaaaccacaaggagataccacttcacacctgctagggtggctctagttaaaaaacaacaaagtgttggcaaggatgtggagaaattagagtcctatattgctggtggaatgtaaaatggtgctgccactgtgggaaacagtttggtggttcctcagaaagttaaacataaaattagcatgtgacctagcaaatccattcttacatatctgtgacccaaaagaattgaacactgggactcaaacagatacttgccagtattaattgcagcattattcacagtagccaaaaggtggaaataatgttaagtgttcaacagatgaattgataaaatgtatatacatgtaatgggatattatttggtcctgaaaaggaatgaatttccgatacatgctgcaatatgagtaaaccttgcaaacataagtgaaataagacagacataagagggcaaatataagattatacttacatgaaatgtccagaataggcacattcatagagacagaaagtagactagaggttaccaagggcttgcagggagaatagggagggaatagagagttgtttaggatgggagtgggggaggaatgggcgattgttgcttaatggatatagtttctgtttgggatgataaaaggttttgaaaattatggtgatggttggatggttgcacaacatgttgaatgtagttaatgccatataacatacctgatagttgtatacttgtatacataatatacatacataatagttcaaatggcaaattttatgttatatgtatataccacaataaaaatgttaaaatatgttaaaaatgtttttccttctagaaattttaaaatcatgtgttttaaagtacgttttattgtatgttaaaaattgattctcattcatggattctgtgttttagaattcacctacatgctaaaatttatttgtaaccccagtattaataatagcagtgccttcacagtcatccctacacatgggcagagcagcaaaaaatttgactcgcccaattcacatattcccagctgaggtgaaactgggagatgctttgccttctttcagcactcatagcataaatatgtgtccttgttgtggccatgttctcattgtgctttttgttgacttcactgcttcaaatggccctaaatgtaataaagctgaagtgccccgtagtgttgctaagtgcatgaaggatgtttgtgctttatggagaaaacacgtgtaaggtaagcttcattcatgtatgagttacagtgttttggctttgaattcagtgttaatgaaccagcgatatattttatttatttatttattttgagacagggtcttgctctatcacccaggctggaatgcagtggcccagttacggcttactgcaacctttgcctcctggtctcaagtgatcctttcacctcagcctcctgagtagctgagactacaggcccatgctaccacacccagctaattttttacattttttgtaaagactgggtttcaccatgttgcccaggctggtcttgaactctggactcaagctttatctacctactttagcctcccaaagtgctgggattatagacttgagccactgcatccagccctcagcaatatgttttaaagtgactttaaatataaatgcatataaaaatgttatgtattgactggttgatgaaaattttgtgaccggaggcttgcaggaacctaatcctgcatttcctctaggagcaatagtttagttaatttgttaatttattgtttgcagcaactgtatagaatataactactataaatgatgagaatcgaccctaggtcaatgcaaataaaattatttcttttatataaatggcaacacctcaagatctttctctgaaaagtacatagtttcctttgatttttgttctgaagtctatttgatcttatattaatatagccactcattaaaacttaattcacaaacgatatgttaatcacacatttgaagtgtatggttcagtagtttttagtatattctgagttgtgtaaccatcaccataatcaattttagagcatttttattactcccaaaagaaaccctctaccaattagcagttattactcacttacccccaaaccattccccccagacttaggcagccattaatctactttattgtctctatagatttgcctattctggacatttcttacaaatcgaaatatacgatgtgtggtcttatgtggctgaccttcgccttcatctgtgctgtagcatgtatcagtgcttcattctttttttaaatactttttaaaaaaactagtcaagtgcagtagtgatatgaggagagagtagagcaaagacttagatctgtaactgactgaacaatctgttgagataactcactaccttcaagtcagccagtacttcactatttttaggcctgaataatatactcttttatggctataccacattttgtttaaccattcattagtaaatggacacttgaattgtttctcttttttggctattatgaacagtgctgctatgaacatttgtggataagtttttatgtgaacatatgttttcatttctcttgggtgtatacttgagagtgcaattgctgggttgtgtggtaacttatatttaatcttttgaggatctgccaactgttatctgaagtggctttagcatttttctttaccatcagcaatatgtatgagggttccagtttctctataatgttgccaacaattgttatcttttttattgtagctatcctggtgggtgtgacatagtatttcattgtggttttgatttgcatttcttttgtggctaatgacgttgagcattttcttttgcacttattgaccattagtatatcttctctgatgaaatgtctgttcagacttttgtccattatttaattaggttatttgacattttaaagttgtcagttctttatgatagtctggatgttctaccctttttcttaattttttttttcttgtctttcttttttctttcctttccttttcttttttttttttttttttttgagacggagtctcgctctgttgcccaggctggtcttgaacttctgggccctaacaatcttcctgcctcggcctcctaaagtgctgggattacaggtgtgagccaccatggccagccctgacgtgctgcacccttatatctgatttagcgctatcttctatttgtgggttgtcttttactttctgtctgggattatttgcagcacaaaagttttttgtgtgtggaaaaataacatgtaacaaaatttaaccattttacccactgttaagtgtgttcattggctttagttatattcacagtgttggcagcacatgttttttttatttatttatttattttttgagacagggtcttgctctgttccccaggctggagtgcagtggtgcaatcacagctcactgcagcctcaaccttgtgggctcaggtaatcctcccaccccagcctcccaagtagctgggactacaggtgcaccactgcacccagctaatgtttttatttttttttgtagagacaggattttgctgtgttgcccaggctggtctcaaactcctgggtccaagcgatcctcttgcttcagccccgtaaagtgcttggattagaggtgtgagccactgcacttggccacaaaagtttttaagtttgatgaggtccaatttatattttgtgcttttgtttttcgcaccatatctgaaaaatcatttcgtaatccaaggtcatgaagatgtattcttatgttttcttttaagagctttacagttttaggttttagattcagattctctgataaagttgagttaatttttgtatgtgaaatttgtttgtgaggtaaagatctagtttcattcttttgcacaaggatatccattgtccctgtatcatttagtgaaaagactactctgtcctccatttaattgtcttagcaacctgtctaaaattagttgactgggtaaatgtgagggtgttttcctggacttaatttcattccattgatctgtatgtctgtctttatgccaataacaaaattaaacaacaacaaaaacagggtctcactctgtcacccaggctgtagtgcagtggtgcactcagggcttactgcagcttccacctcctgggctcaggtgatcctcccacctcaccttccccagctgagactacagatgcgtgtctcacaccactacagatgtgtggctacaccacacccagcaatttttttattttttgtagagatgggttcttgctatgttgctggggtgggttgttctttttcaagatcgttttggttcttctggatcccttgaattttttttggtttttgttttttaaaggacagatcttgctctgttgcccaggttggagtgcagtgatgcgatcatagctcactgcagtcttgacctcctgggctgaagcagttctttcacctcagactcctagtagctgggactgcagccgcatgccaccacgcctggctaattttttaattttttgtagagatggggtcttgtattgttgcccaggctggtcttgaacttctgggctgaagcggtcctcccgcctcagcctctcaaagtgctaggattacaggtgtgagccactgtgcctggcctccatcttcttttaatgtacttacattattgtgtttgaagcttcttgtattaatagatagcattactgttagattatggtttaagtttattcactcttctggtctttatttagttcatgtgtttaggagtatttaaggtatgtaggtatatttaaggtaattattgatgtgttatggcttaaatatgttattgttttctgtttgtttcctttgtttctcttgacttcgtttgagttacctaaagttctttttaagattccgtctttatttatggtggttttgtgtagtttatagtttttggagtgctttgaatagcgtcttagatatcgcaacgtttatttgtaacttaaagtctttgtattgacattttaccatttggagtgaagtatagacgttttacttctagttaggtccctttactcttcctagttttaaaatgattatctttaattttctgtctatatagatgaccagataatatatgatcttttttataagctctcacatgatttaagaaatccatgagaagaaatctattatatttactctcatttttttttttttttttttttttttttgagacggagtctcgctctgtcgcccaggccggactgcggactgcagtggcgcaatctcggctcattgcaagctccgcttcccgggttcacgccattctcctgcctcagcctcccgagtagctgggactacaggcgcccgccaccgcgcccggctaattttttgtatttttagtagagacggggtttcaccttgttagccaggatggtctcgatctcctgacctcatgatccacccgcctcggcctcccaaagtgctgggattacaggcgtgagccaccgcgcccggcctatttactctcatttttatcattccagtgttcttttccaaagattcaaggttccttctgttaacattttttttttctgttacggcaagttttctttaaccatacatgcttttaggggtattagtgacaaatttttatatattttttcatctgagaatatctttagttgtccttcattcctgaagggtatttgttgaatatagaatttgcatttctgagttactttctttcagcctttgaatgatgttgagccaggttgttttttttttttttttttggcctgcatggttttacatgagagatccactgtcatttgaatagatgttcctctgcaagtaaagtggtcattgtctgctttcaagatttttttctttatctttcagaacttttatgatgtatcttggtgtggatttatttgggtttttcttatttggcattaactcagtttttttatatgtaggtttatgtattttgtcaaatttgggacattttcagtcattatttgttcaagtaattttttttttttttttgagacagagtcttgctctgttgcccaggctggtgtgcaatggcgtgatcttggctcactgcagtctccatttcctgggttcaagtgattcgcctgcttcagcctcccaagtaactggtactacaagcgtacgccaccatacctggctaatttttgtatttttagtagagatagggtttcactattttggccaggctggtcttaaactcctgacctcaagtgatccacctgccttggcctcccaaagtgctgggttacaggtgtgagccactgcacccggcctgttcaagtaatttttaaattttatgtactcctctccttctggaactctgcagctctggtgacagcaatgctagctagctagttttttattgttccacaggttcttgagactgtgttctgtttttcttttcttttcttttggtctcttgattttgcctgaaggtcagttattctgttgcctgttatcttctcttgtctattgagcccatttattgagttttaaatttttggtttttgggttttttttttttttttttttgagatagggtcccactgtgttgcccaggctggagtgcagtggtgtgatcttggtgccacgacaccggctaatttttgtatattttttgttagaaacggagtttctccatgttggtcaggctggtcttgacctcctgacctcaagttatctgcccgtctccatttccaaagtgtattttttaatcctataatttccattggtcttttttttctataactttcatttcttttctattttccatttgttttaaggacattcgtattgccgttttaagatgaggtcttactctgtcgcccaggctggggttcagtgttgcgatctcagctcattgcaacctcttcctcccgggttcaagcaattctcctgcctcagcctaccaaatagctgggactacaggtgtgtgccaccatgcctggctagtttttgtatttttagtagagatgggggtttcaccgtgttggccaggctggtctcgaacttctgacctcaagtgatctgcctgcctcagcttcctaaagtgctgggattacaggtgtgagccactgtgcctggcttatattgctttttgaagcattttcataatggttcccttaaagactttgtcagatgtttctaatatgtgatatctgatcatcttggtttgggcatgtactgattgtcttttgtcagttatgattttcctggtgtttgacaaataattttttgagtatattgcaaatattttggatatcacattctgagacttgcgattctatttaatcttcatttttttccagcagtctttctactgaggtataacataaaggccaggtagggtgtatgttcaccttccccttgggcctcctgacaccaccctggcaaaagtggagtgctgactttctctgccatgttgcagataggtgagatgaaagttcaatttctcccttggtccttcctgatgaagtggggtaccaactcataccaccttgtcacctctgatttagggtttaagttcagttccactgagcccttgtgataccagggagggaggaaatgtagggctaactcattccactggattgctacataataggggtggagtctcagctttccacttggattttatcataccaggcaaagggataagaagtgatgatttgcctggtctcttacccccttattccttattattgccaggtgggagtagaagttcagcttcctgctattccctactgatattgaggagtaggagattttttttttcagtatttttagttttaaaaaaaaaatgggggcttcaattaaagtcgcctttatttaagatcccagcagtggaaatactgagttcttttggtcctaacattttacagattatagtcgtgagattatggaatcatgactcactaaattcatgcttttaattcctattctctgcaaggcagtgttagattatctctgctcttgggagtttggagttttggagactttaataaacacgtactttttttttttttaaaagacagagtctcactctgtctcccaggcgggagtgcagtggtgtgatctcggctcactgcaacctccgcctcccaggttcaagtgattttcgtgtctcagcctcccgagtaggtgggattacaggcatgtgccaccacgcctggctatttttttgtgcatttttgtatttcttatttttatttttggaggtgtagtctcactctgtcatccaggctggagtgcagtggtgcgatgtgggctcactgcaacctccacctcctgggatcaagcaattgtcctgcctcagcctcctgagtaactgggactactggtgcacactgccatgcctggctaatttttctttatttttagtagagacagggtttcactgtgttgcccaggctggtttcgaactcctgagctcaggcaatctgtctgcctcggcctcccaaagtgctaggattacaggagtgagctaccatgcccagcctaatttttgtatttttaatagagatggggtttcaccatgttgaccaggctggtctcgaactcctgacctcaggtgatccacccgcctcagcctcccaaagtactgggattacaggtgtgagccaccatgcccagcctaaacacacatttttaaagatgaaaaggatgaccagtataattcttgcaaatgaaacaatttgcaggtcagagtcttgatggttagttagccaagttttttttatttttttaccagttcaattaaaaaattatttagaaaaagtaaaacgtgggcatggttagagtttcaaacagtataaaagaatataaaataactcatttaagtctgtaagtttccaaagtatgaaatgctgactatctcatctttattataaaatttgaaacaacacactaacaagctcttaagagctccttgaattttgtctggcagaccattatttcaaaataaaacatctttttgcaaactcagttatgtacatttttatttagcacaactgcctgcttaacatcttttcttgagtgacccagatgtgtctcaaatttactgtctctaaacttgaactaattgtagtttccaaacctccacttacaaactgtaacagtcatctcattgttccggtttcctaaaccagaaatttgggcatcgttttcatctcctcttctaatactcctctactcctcagtctgtagttttctagtaatattttatctgtgatgtctttgtcttatgtctttggtaacagggtgatattggcctcttgaaatatgttttttcttctctattttctaaagagtttgtttgaggtttgtattatttcttccttgagagaattcaccattaaaaccaactggggccgggcacggtggctcacactgtaatcccagcactttgggaggctgaggcgggtggattgcctgagctcaggagtttgaaaccagcctgggcaacatggcgaaaccccgtctctactaaaaatacaaaaaattagctgagcgtggtggtgggtgcctgtagttgcagctactcgggaggctgaggcaggagaatcacttgaacccaggaggcagaggttgcagtgagatcatgccactgcactccagcctgggccacagacagagactccatctcaaaaagaaaaaaaaaaaacccaactgggtctggactttcctttttgtagattttaaattactgatctagtattcagattgagtttttctatgtcttcttgagtcagtttggtaaaaattttttttttcaagacagggtcttgctttgtagcccaggctggggtgcagtggtgtgatcgcagctctctgcagccttcatctcataggctcaagcagtcctcttgcctcagcttcctgagtagctgggactacaagtgtgcaccatcgcacctagctaattaaaaaattatttttgtagagacagggtcccactgtgttacccaggctggtctcgaacacctggtctcaagtgatcctcccatctcagcctcccaaagtgctgggattacctagctggtaatttgtatttttaaagaatttgacccattttgttttagtggtctaacttggcataagaggttcatagttctattagtccattctgacactgctataaagacatacctgagactaggtaatttacaaacaaaagaggtttctctggttcttcctgctgtgcaggcttctgcttctggggaggccttaagaaacaatcatggcagaaagtgaaagggaagttaagcacatcttcatacggctgacaggaggaagagagagtgaagggggaagtgctgcagactttcaaacaaccagatctcatgagaactcagttactataatgagaacagcaaaggggaaatctgcccccgtgatccaatcacctcccaccggggccctcctccaacattggagattacaattcaacatgagatttgggtggggacacaaatccaaaccatatcagtaacattttggcaggatctcttgttaagtcttatatttcatttttggttttggcacaatgtgctctcttttctttttagatcaataccaatctgtcttctctatctccccccatctccctccctgcactcattttcccatctaggtaattgtttatcagttgttttcaaagaaccagctttgagtttcgttcccctttcttccctattcatagctactctgatctttatttcgtcctatgtaatgttttcatttggtcttctttttcgagcttaatgaggggcatgttgagatgattgcttttagatgtttttttcctttctaatatatgtctttgaagctatacatttctctctaagttcatggtgttaaatgtggtacctaatggccatatgtgacaaaattaagcgtaaatgaaattgatgatttacttccttagtcactgttgtcacatttcaggtattcagtaatcatgtgtggctgatggctgccatattagacagtgcagatatagaacattttgtcatggcagaaagttttgttggactaatggcctgtaatcccagctctttgggaggccgaggtgggcagatcacctgaagtcaggagttcaagaccagccgcgccaacatggtgaaaccccatctctactaaaaatacaaaaatattagctgggcatggtggcgcacatctgtaacctcagctactagggggctgaggcaggagaatcacttgaactgggtaggcggaggttgcagtgaggtgcgatcacgccactgccctccagcctgggcgatagagtgagactccatctcaaaagaaaaaataaatgtttaagcactctttcagctgtatcccatggggaggaaaaaaccaatataaaaaaatatatatatacacacatatatatatatatacacacatatatatacacacacacacacacacacacatatatatatagttttttttctttttttttgtttttcttgggttttttttcggacagtgtctcactctgttgcccaggctggagtgcagtggcgcaatctcagctcactgcaacctctgccacccagattcaggcgattctcctggctcagcctcctgagtagctgggattataggcgtgtgccaccgcacccaactaatttttatagttttagtagagatggggtttcaccatcttggccaggctggtcttgaacccctgacctcgtgatccaccaccttggcttcccaaagtgctaggattacaggcgtgagccaccacatctggcctatggttttaattttgtgtttggttcatttacatttataattgttacatgtatctgatgtattgattctttaacatataaaatgcttcattttacttagtaatatgctttgagaatctttttttcttctttcttttttggagacagagtcttactctgttgcccaggctgcagtgcagtggcgtgatcttggctcattgcaacctccgtctcctggggttcaagctattctcctgtctcagcctcccgagtagctgggattacaggcatgcgccaccacacctggctaatttttgtatttttagtagagacagggtttcaccatgttggccagactggtctcaaactccggactccaagaatctttttttttctgatgttagtgtgactactccagctgtcttatggcaacagctttcatgattttatcttctcctctccttttactttatccctatttattcatgattttatcttctcctctccttttactttatccctatttatgtatttgaatctaaaaatgtttctttcagaggatatatagttggattttactttttatccagtttgacaatctcttcttttcattggagtgtttactcagtgatatagttggatttaggtatgccattttgctagttgttttccgtgtgtcatttttgttcttttccttctttactgagacttctatgtttaccaatatttttagtgtaccttaaaattttcttttagtttttgttttagttttaactcttgcaattatgatatctctctttttttttttttttaaggcggggcagggccttttcacttctttttttttttttttttttaaattgatcattcttgggtgtttctcgcagagggggatttggcagggtcataggacaatagtggaggaaggtcagcagataaacaagtgaacaaaggtctctggttttcctaggcagaggaccctgcggccttccgaagtgtttgtgtccctgggtacttgagatcagggagtggtgatgactcttaaggagcatactgccttcaagcatctgtttaacaaagcacatcttgcaccgcccttaatccatttaaccctgagtggacacagcacatgtttcagagagcacagggttgggggcaaggtcatagatcaacagcatcccaaggcagaagaatctttcttagtacagaacaaaaatggagtctcctatgtctacttctttctacacagacacagcaacgatctgatttctctatctttccccacatttcccccttttctattccacaaaaccgccatcatcatcatggcctgttctcaatgagctgttgggtacacctcccagacggggtggcggccgggcagaggggctcctcacttcccagcaggggcggccgggcagaggcgcccccaccttccggatggggcggcggccgggtggaggcgcccccttcctccctcccggacggggcagctggccgggcgggggctgccccccacctccctgctggatggggcggctaattatgatatatctttaacaccacaattcacttcaggacaatactaccttcattttgttaaaatatagcaactttgttccactgtagctccatttctatcttttgtattgttatagtcatgattgttacatttatatagtctggttttatttcctgtcatcctgacagacttcctttagattttttgtggtacaaatatgctaagtgtgactttctctcaaattttgtttacctgtggctgtttttattttgccttcatttttgaaggatatttttgttgcatatacaattcttggtttataatttgtagtttgaatatgtcattttattgcttcctggcctccatatttttaatgaaaagtcagatgttgatggattggtttccttgatgaattatttttctcctggttttcagcagtttgactgtgatgtgtttggtttgattcatttcgtgtttattttgtttgtggttctctcccctttttgaatctgcagattaatgtgtttcatcaggttttgacattttccaccattatttcttcaaacattttttctatttctttgctcttatgtcctgtgacttttattacatttatgttgggagcttgacattgttctactggtttctgaggatctgttcttttctcgtcagtcttttttcctctctgatttttttgattggattgaaattaaattttaatttatccatctacaagttcactcagatctttttttgttttttgagatagagtttcactcttgttgcccaggctggagtgcaatggtgcaaccttggctcactgcaaacctctgcctcctgggtttcagcaattctcctgcctcagcctctggagtagctggaattacaggtgcccacaaccacgcctggctaattttttgtgtttttagtagaggcagagtttcacatgttggccaggctggtctcgaactcctgacctcaggcgatccacctaccttggcctcccaaagtgctgggattacaggagtgagccaccacgcctggcctgaagtgtattattgaagcccagatatgtagtgaattttttattttgcatgtacttttaatctgtgtggcttctttttatagttcgctcttaagacttcttatttgttgaggctttgccatattattttattatttgaacactggttcctttttattcttttaaaatatttataatagttgctttgaaatctttgtttttattctcacttggcctttagttttttcagggctttcttgtgtctccctttggtatgtgcagtgtcccaattagccatgtctgtatagagagttgatcttagcccttccgtgactctctcatttcaagtttctttgtattaatgtggttgatctgctgcttgctgtgtgacccccaacccaggtatagcaaaacctgttctttccagacagatactaatttatacctggcaaatctcatgttttcgcattcacctctctccccaattgattctaccgtgtgtgacagcaaagctgctgtttttatggtcagccccattctagtaaaactactgatttttcagaccagactttaggactaaatggggaccatgggagcatcctcaagcaagagggccagtgcctttcattgcttttacctgaaactttagcagtctttgtagaataagtgtgtctcattttgcatgacagtagttgattccctgtggtctgaattcgttgtttgctttttttctttgtgacagttttgtacagttttatactttgtctttgaagagaggatttgctttcccttgtgccattattgaaagtggtccagctgttaattttttttgtaccttcattttgttgtaaacttatcttttaaattttagtagtcttaaaaaataagtgacatctcaggtatcctgtgttttctagaactgcagtgtcctgtaccatagcaactagtcactggtggtgatttaatttttagttatctaaaatgaaattttaaaatttagtttgttggttccactagccattttgcaagtgctcagtggccagtgttgtattgagtactgcattgaacagtgcacatacagcacgtatccattattgcagaaaattctgttacacagtgatgctctaaaatctttgagatgaatagtaacttgtaataatagcttacattttgtgagcacttagtgtgtgtcacattttatatgtataaacatgtagtcttcccaacaacctttgaggtaggtactgttatccctgttttgcaaaggggaaactaagactcaaagattaaggaattaacagctctgaaggggttgagatttaaatctgtgtagtctggctccagaatctgttccattaataattttgtatattgcctctttggtaaatgacatgcctggtttctgacttgaatagagaagtgtttttgttttttttttttcctttaaggttttgctagctttaaatgctatttaatattttggtaaatgattctttcatatttaggttgtttgcttctcttttttagtgttcttactaaaaatgtctgaattttatcatatgccactttaacatctgtttatataaccatatagttttcttcttcagttgttttgatatgattattttgttaaatttctttccgttgaataatccttgaattcttggtaaaccttactgatcataatattcttttgacagattgacagaatgtttgctaatatttcatttagaaatgtagagtcaatacgctggagtggtctgcagttttcttcttttgcattgcctttggtaggttttaatagtaaaacaatgtcgggctctataaaatgaattcggattttcactcttttgttctagattggttcaaataataatggaatgctggtttattctttaagcattactctcctgtataactatctggattttgtattttttttaaaatggcaacgtcttctaatctttgtatgcttacatgtctcttcaagtttaattcttgttttgcttttgatgaatcatattttactagaaaattggccatttatgctagattttaatattgcttgctttagagttacatggagtattttctgatataggcttagtaatcttttaaaattgttttgctttgtctgtttccattctgacttctctatgtttttttctcttcattagattcctaaagattttacttttttctcaaaaaatttttaggttatcaattttgttttcagtaatgtatatatttcagcttttatatttaattctgttctcatacttctgtttttttaaaaaatttgtcaaggaaagaactaagttttattagttttgtttttaaacatttaagtctacagatggaaataatagagttgagtatgaactgtttctgctgcatttttttctagatagcttgtaatttaggtttgatttccagatggagtccatttttattttgggttgtgtgtagtgatgtttttatttactttcactttgtaaagttttaaacttttataggatgtggactgtaaaattcagtatctttttaattgaaaggtttttttttttcttatttgtttttggtagctgaatacaagatcaaattttttaaatattacacagacatacccaaaaatgtatatattctattctaggaatatataataaatagctctgaaattatttcatccattcttttatgttttggttttttatatctcacttgaaaactgtacttctatgttttcatgatctcctttattttaataatttttccgtattattattttgagacagagcctttctctgtcaccctggctggagtgcagtggtgtgaacatggctaactgcagcctccacctcccgggctcaagcaatcctgcctcagccttgcatgtagctgggaccacagatgcacacctacacgctgagctagtttttaaagtttttctagagatggggtcttgctttgttgcctaggctggatccttttatttatttagttgttgtttttgttgatagatttcttttgaaattttcatgctgttttttcttggtcatactaagtggcattctcttttgctttgttaaacatttatttttattttgagatggagtcttactctgttgcccaggctggagtgcagtggcgccatctcggctcactgcaagtcctgcctccaggttcacgccattatcctgcctcagcctcccgagtagctgggactacaggtgcccgtcaccacgcctggctaattttttttgtatttttagtacagacagcgtttcaccgtgtttgccaggatggtctcgatctcctgacctcatgatcctcttgccttggcctcccaaagtgctgggattacaggcatgggccaccgcgcctagcctaagacttatcctttattactgttttttagcagtttgattatgatgtgctttgcatggttttatttagaagtgctatcttcagagattattgtggttcttcatctttggcttatagtttttattaaagttggaaaacttgatcattagttcttaaagtatatttctcattgtttttatttcttcttctgggaattcagttacacatatattagaccacttgataattgtcccacaggtagtgagcctctcttttgttttgtggggggtcatattttgttcatcttcatgttcatttctgtttgtctcccttcagttttgccagatttttcttcatgtgttttgaagctgtcttgttatgtacacatatgcatataactatatcttcctgagaatggatatctttattattatacaaattttgctcttgtctctaatgattatttttgtgtaagggtctattttatctgatattagaatagccactcctgcttgtttttttttttttgagatagagttttcgcttctgttgcccaggctggagtacagtggtgggatctcggctcaccacaacctccacctcctgggttcgagcaattctcctgcctcagcctcctgagtagctgggattacaggcatgcgccaccacacccagctaattcttatatttttagtagagacagggtttctccatgttggtcaggcttgtcttgaactccctacctcaggtgatctgcctgccttggcctcttggcctcccaaagtgctgggattacaggcatgagccactgcccctggcctttttttttttttttttttttttaaatagagacaaggtcttgctcagtcacccaggctacggtagagtggcatgatcctagctcactgcagccttgaactcctgggctcaagcagtcctcctgcttcagcctcttaagtaactgggcctgcaggcaaataccaccacacctggcttaattttttttttttttaatttgtagaaatggggccttgctgtgtcacccaggctggctttgaactcctggcctcaagtgatcctcccacctcagcccaaagtgctgggattacaggtgtgagccaccgcaccaagactccagctcttatgtaattactgtttccatgatttgacttacttttttctttcatcctgtatttgtctttgatttacggtgtgtttctgggctgggggcagtgacttatgcctgtaatcccagcactttgggaggttgaagcgggaggattgcttgaggctgggagattgagacccgcctgggtgatatagtgagaccctatctctacaaaaaatttaagcaaactaaccgagtgtgatggtgtatgcccgtagtcctaactacttgggaggctgatgcaggaggactgcttaagcccaggaggttgaggctgcagtgagcgccactgcactccagtctgggctacagagactatatctggaaaaattaaagtgtgtctctggtaaacagtatatagcagtatatagttaattttatctgctctttattttcattggggtatttaattcattctcatttactatcattattgttatggttagatctacgttgattgctttgctctttgttttctgtatagctcatgtatttattgttgttcattggttcctccttatgttagatatgagttctaaatttctcttcaaagaatcaatgtcagtgtgttcaattctttgccttctacttctaaacttcctcataaagcaatctttttcgatcacatgctccaccctgactcattccaattacctgctccacactgactcattccgattacctgctctgccctgactcattctccaccctgattcattccgatttcctgctctgccataaccatttttcctgccaaaccactcaccccgtcactctctttaaagtagccaatcggaattagtttagcctgtgtggtctaaccctcaccaataggggaacaacacagcagcaggggccatgtgcgtcaggaataagaaccccttcccctcccttgtccaggtgtgcgttcaccattgctccatctgtgagggcgcatccttctataaaaataaattgccttgctgaggaaaaaaaatgaatttttttttttttttttgagacagagtctcgctctggcacccaggctggagtatagtggcatgatctcggctcactgcaagctccgcctcccgagttcacaccattctcctgcctcagcctcctgagtagctgggactacaggcgcctgaaaccacacccagccaatttttttgtatttttagtagagacggggtttcaccatgttagccaggatggtctctatctcttgacctcatgatttgcccgcctcggcctccaaaaaaagaacattttatatttgagtgctatttcttttgcggcaccaaaactttataacacactgccttctgaatttttttttttgtttctgctcagctcattgttaatcatattgttcccatgtatgtcatgagttatttttctcctagtcttttcaaaattttcttgtctttgacttttaacagtttaattgtaacagtgtatatctttaaagttaaattcatgcttgtgaatttttataagagccacaaaggccttcctctgtgttttgtttttgtttttgtttttgttttcatttttgagacaggctctcactgtcccccagtggcccaatcactgctcactgcagcttgacctcacaccctcaggtgatcctcccacctcagcctcctgagtagctgggattacaggcaggtaccaccatgcctggctaatttttatttttgtagagacagggtcttgccatgttgcccaggctgatctcaaactcctagactgaagcgatctgcccgcctctggctcccaaaatgttgggattacaggcgtgagccacagcatctggccacttctgtattttgttttcaatcactttattatgaaatgagatacactgttataaagtattttctattttgataattcttaaaaattccacttgaaaaattttctgcttgaatcacagtattgttccttaattagcaattatttcactttggggaactggtcatttttaaaattttatttcttagagttatttggattatgctcatatatgttgtcattaaaatatttaattttggaatttaagaaaattgcagccaggttacatgattaatgtggacataggaaaacaaaatatttatgtttctaagtttaaaaattttattcatatattcagtgtttgggatgcataagtgttcacattttaggaaggcaagatggtacttaaatttccagcatggtctgtggtcgtaccctataatcaaatgccttaatatttctgcagcagtatttacactaaatagcgtaactaaagatatatatagctttatgacagttcaggtcaggtttttttcactaaatgtgttttgtagctaaacatacaataattttctgtatttcaaaaactggataaggaaatgtgagcttgacaaccattcaattttttataaaataacatgttttccatttttgttttaccttttgtttgtggctactatcctgcataaattgcataatttgttttgacaatttgtggactgtgtccttcattgttgtacagtattcccactattcctatttaatgcttttttaacttttacttaggtttatctaatgctaatattcttcctgtttgtttttgttttacctttttgttttgttttgttttttgcagttgctgctgtatgtttgtttatccttttctttttcaataggtatgtcttgaagtttcattagtagcagactactaatttgcttctcaggattgccatttttcaggtcttctaattttttaatatggaaattgtgtttatttaaatttagcagggcacttctttttttttttttttgagacagaatcttgcttgctctgtcgccaggctggagtgcagtggcatgatcttggctcactgcagtctccgcctcctgggttcaagcagttctcctgcctcagcctcccgagtagctgggactagaggtgcacgccaccacacccagctaacttttgtatttttagtagagtttgaccatattggccaggatggtcttgatctcttgacttcgccatccgcccacctcggccttccaaatcgctggaattacaggtgggagccaccatgcccagtctgatttgctttcttatcattcatatgctcactggactgtcacttttaatttccttcaagaactttgcaggccaggcgcagtggctcatgtctgtagtcccaacactttgagaggcctatgcgggaggattgcttgggcccaggagttcgagaccagcctggacaacaatatgagaccctgtctttacaaaaaatcaaaaaattagttgggcatggtggcatgagcctgtggtccccactgcatgggaggctgaggtaggaatcacttgagcccaggaagtcgaagcttcagcgagcagtgttcatgccattgcactccagcctgggccatagagcaagaccctatctcaaacaaaacaaaacacaaaacttttcctttgcattcacaactaggctaactggcgcaagaggcctagcattggcctgtcttggcttttgatatgccttctcactaagcttaacaatttctagctttttaaaatttaatgtaggagatgtttgacttgttgttgttgttgttgttgttgttattgaccaagtcatgctgaatcgattcttcttttcagttggacactttgaggccattgcagggttatttattggcctaatttcaatattgtttggtctcaggcattagggtggcctgagaaagggagagagacagggagtggccagtcagtgaagcagtcagaatacatttattgattaagtttgctgttttcattgggcgcagtttgtggggcctcaaaacaattacagtagtaacatgaaagatcagaactcacaggtcaccataatagataaataataatttataagttaggaatattgcaaaaattaacaaaatgtaacagaaagacgcacagtgagcacacattgtgggaaaaatggcgtctactaatttggttaatgcagggttgccacaaaccttcaatttataaaagctcagcatctgtgaagcagtataaagctaaatgcagtaaaacaagatattcctgtataacttcaagaatataagaagccctaagaataccaacaagctttatgataatagatattagttatacttagtttattataagatattagtgttcttcgtatatgattgtatgtgcacatatgtggccatatatgactatgacttcaccttaagccagcttcattcttaagtgataaaattaactttggaaatacttactgacattatctaaatatatgttactctatgatattattttataggatttaagccatttttattataaattatttcagttactttctgtatcatatctccaagttttccctgtataaagcagcattcttctttattctccctctattgacaggtcattttgtctcttttcttcattgccaagttttttgtaagagtgggcaacatattcagcatttcacatcttcagttccccacgctcatgctaatgtctgtctgccgctacctccattgctataaaatttctttagtaaagatcagtgacctgttgctccagaacataattattgtttttttgccatcattcctttttggcaaatacatattgctttctaggtctctattttttaaatttgattttcttgctctgttataagaactaaattatcttacagatgccagtgaacaattttgaaaaacacttccttaccccatatcacatctctctgacagagagagaagaggccatgattatgtcaacagtttgaacagcggcatcttgcaagaatttcagaccaactgaccactcatcaaagaacttggcagctttttaatcttgtttttttaatacaacagtatatccattctgatgacaaacctgtcccgccaaatctccacaacacacgttgtaaaatcagtgattagcaaattagtcagctttggcacggagctgtgcttgcttgcccatgacagtctggaaactggttttgtacttgcaacagattatcaacaataagttgctcactgtaagaagtagagttgagtctcttctgcaggtgtgtgtccagtgatcagcatgtgtgaaaagtattccttaatatatcttctgaagactttttctgtttctgttggaatcttctttgattacaaattggttattaccatctatagaaccacttgtacccagttcagccaacaaaaatgcaagatgtttgggctgatgatgtaatagtttacaaatatctgtaaagttgacaaaataagttttcttggttcctactcaaatgacctgtagaggtttgatgacagatttccttttcagcaaccacatctggattcttttccctcgtgatgttgcacactcgcttcagtagctccttatgtgtatttgagactgccctagcagggcctgtatgattattgaatgagatactgtcatcttttttgctgtcttcatcttctagaactttgtctttctctagtatttcatcctcatctgggaacttgacattcttctttttcttctttttattgccaagcataatattaaggtcatactctggttcagctggttcttgaatattttttcaatcttaagatcctttacaccttcttcagcttcatcagtatcaaacatcttttttgtttttttcttttcttttcttttgattaaagaagttcaagtcatctagatcatcagaagcacctttttccctactgttctcttcatcagcttccaattctttgtccccagttggctctggcgccacttgttttgtttctaagggctgggtctcctctgtttgggtatccccttcctcctctaactaaaggactgctgctgctgattttacttcttggtcatagtaggatcaaaaatcatctcatccccagacatggctgcagctcgaatgggctaggcacagacaggaagtcagacaaatcagccctagcccccagcagcagcgctgctcctgctgttacctctcacaccactgcactctctagccccttattaatgtgtgcacatagggtgggaatagagatgaataagagataggtgcatggtggagagaggaactagacttaggcatggttatacttctccagtttgaggtttctggcacgacttgacaatctttttccatccagcttctttttcctattctttggataattcattccagtctttcaacacttaactcacaggactctcttatcatttggactgggctctgacttaagtaattagaggctgtaggtataaattctctcaactcccctctctatctgaaaatatatctgtaatttttcattattttctaagggaaaggagagtggtgttgatgaccaaagctttggtgtgactgcttgagaatattggaaagagaagctagggctaaatgaaaagattgttaggtcatgctaagagtcagctgactttaagcgcattatgtaattttaaaagtaaattggtacagtggtaacaagttaatcataaatggttaatggaaaagtagttgatccttgtttgacttgtgtttgtttcagttacacagacaggtatgtatttgtgtcctggcctttgatgtaaagtgtacttcctgtggtttgcagttgaaaatgtttgaaagctgtctcctaaatttgagagctctgtttcttctgcttgacttgtaaatattggtgtaacaagggttattgtccttgataatattcttcctcagcagtcataactacatttcacatttgagttatttacatgctggtagctccctccacacccttcagctccagaaatatgctagttaaacaccatctatccaaaacttactcattacatttctggctaaaacactttttcctcattttgagtagttatgtaattatctatgcattacccacaccaggaacttgggaatcatctagaatttctaatttgtttcctcattgtaactcttagtactccttcatcatacagtcatttattaagtccaattgatactctgatttatcctctacatttcctttaatactgccttagtttagtctcttttgttactgatagaccagcgttttaattagagaaatagtttagcatagttcttaagagcatgagctgtagacacagacatgttagttgaattcagatcttggcatttacgtcaccacatgaccttcagaatgtttcttaatctctccgaacctcaattttttcacctttaatgtggggatagtaatagaacctactttacagggctgctatgaggactaaatacacttatacatataaacttcttgaagagttaactgatctggcggggtgcggtggctcacgcctgtaatccgagcagtttgggaggccaaggcgagcagatcggtcacctgaggtcaggagttcgacgccagcctgactaacatggagaaaccctaatttagttgaaagatacagattaaaatcagcaaagagaaaaggtgcatggtgcaaagcccaagagaaagcagacccatgctttcagatgtccccagcaacaatgtgggacaatacactgggagtattgccaagtagggaatctcacctgagccttggtgtctaagttttggagatcagtctcattgccacgcagcccccacaggactggtaatcagctacttggacaccagtgcacccagaggtcaaacacggtatggcttaaagcctcaggtatacaaaagtactcttaccaggcagaattttccacgggctcagaggtcatctcccaggaacgtgtaaagggccagtcctgaagataggcctttcttaagaaggaatgtgcagcatttgagcaacccaggcctgccaaataaaccctttcttgcacactagtatagtcacgttcattcttcaagaccctattagaagtgttatctttttggtgaaaatttaactgatttactctaagaagagttagttgctctcatatctttgtctctacagttacttatacttatcttctttgtagttttatataatacactttctcaagaggtttttaagtcatgctttcccaaatgtgaaaatatttttccttttcccctttctcttcactttactatttctccctttggtttgaaaaattgtttttgtgtgtttccttttaccaagatctttttatttatttatttttttttttgagaccgagtctctctgtcgcccaagctggagtgcagtggcgcgatctcagctcactgcaacccccacctcccgggttcaagcgattctcctatctcgccctcctgagtagctgggaatacaggcgcgtgccaccacacccggctgacttttttttaatttttagtagagacggggtttcaccatgttagccaggatagtctccatctcctgacctcgtgatccgcccgcctcggcctcccaaagtgctgggattacaggcgtgagccaccgcgcccggctctttttatttatttttataccatgtttttggtaaaataaagaggaaatattaataagaacagtattttgttttaaatatataacagtagttattttttaattttaattattttattttaaaattagagatggcgtctcactatgttgtccaggctggcctcaaactcctgggctcaagtgatcattccactcccaaagtgttgggattacaggcatgagccacctcacccttcttttagagtgataagttttatttatgttttcattttccatcagaatgactatatatggtactacagtttgtgtactacacaactcatggggacttggtttatatcccagtctttggtgctttctgtaattgtgtacattataaactataaaaattacatactaatctagaatccttcttgaaggtgtggattgtgtcatttatgctgtatcctctatttcatggctgacatgtagtcagtttgttgtgttgactctggtgctattttcagttatttagcctctatgtgttacctcaacagtttatccattctgataagtcctggaacactagcaggtgaagggacagatgatctttcttctcatattagcatgtattcaagtatctctaaccaagtcagaatttataagatgatagattgtatattagttttctgttgctgctgtaacaaaattaccacaaacttagtgtcttaaaacagcacctgtcttactgttttaccattatggaggccagcagtttgaaatccctttcactgggctaaagtcaaaagtggtggcaggactggtccttctggtggctctgggagaaaatccatttccttgtctctttcagcttctagtggttgcctgtctttcttttctccggcttcttccttcatctataaagtgcatcactctactccctgcgtccattgttattataattgccttccactcttctgtagtcttaccttcctcttcctccccctgataaggtcacttgatcacgtttaggacccgctggacaaaccatctccagagccttaatcgcatctgtaaagtcccttttaccatgtaaattaatattcatagtttccgaagatcaggatctggatttcttttggggcaattattcagctaaccacatattataatgaggaagcacttcttgggaggcatcataatgcttgttttttcttttcctaaatagagtatcacttttacccaaatggaataactcgctgggttattttactgagctcttgatgctcatttctttggtcttctctgtgatgaattaatgtttctatatggacatcatgcacaatttctttattcctgaagaatattttaaaatgttgttattttatgttgtagttggtgtaatacggtgcccagtatgccgccaagaatgcagacagatagaccttgtggataattattttgtgaaagacacatctgaagctcctagcagttctgatgaaaaatcagaacaggtatgcttctcaatttttctttatattcctatcttgatatcaaactgtaagttataagaaaaacatgtttggatagttaagtcatttagggtggttctgctatggattcctgtttcaaatagaaagttaaagatagctttcttatatactctcaaacttagttaaatgagactaaagctattacttaaaatgtcaaatttgggccaggcatggtggctcacgcctgttgtcgcagcacttagggaggctgaggtgtgaggattgcttgagccccggagttcgagaccagcttgggcaacatagtgagactccatctctacaaaaaataaaagtactagccgggcgtggtggcatgcgcctttagtcccagctacttgggaggctgaggttggaggattgcttgagcccaggaagttgaggctgtagtgagccgtgattgcactactgctgtccagcctgggtgacagagcgagagcctgtctcaaaaaaaaaaaaaaaaaaagtcaaatctgcacagacttcgtgttctcagccttagatttttacctacatgaatgatctgtaaggaaaaggattttgttgaagataaatggataacaaaataattttattctgtgtacagtgaaatagtatattgaagaacaagtttttttttttttttagatctagattttatgtatttaatttagattagtgcttatttcttcttttaggtatgtactagttgtgaagacaatgcaagtgcagttggcttttgtgtagaatgtggagagtggctatgtaagacatgtatcgaagcacatcaaagagtaaaatttactaaagatcacttgatcaggaagaaagaagatgtctcaggtaagatagatgcattgtaatcattacaatgattacagttaacctccttcttttgcccctatagaattttctacttattctttataaactttggatagcaacatcaataggaatttagaaaactagacaaaaattttatgtttggttaaaaaatatttgttttattttgctacagagtctgttggagcatctggtcaacgccctgttttctgccctgtacacaaacaagaacagttgaaacttttctgtgaaacatgtgatagattgacatgtagagactgtcagctattggaacacaaagaacataggtacagaaatcataattgcttaccaggaaatactataaaaagtgcttgtaaagtcattcttcttcttaaagcaaatattgattatatgtttgtgtcttaatcttttaaatctgtattttacatattttaatttcttgagcaatatatgttttggtaaattatttaaagatttccacatttaaatctaattgtcttatgaatgtttgttaaaatgtatcattttgtaggtttgggtttacaagaatggagttatattatgcatttgtttgctactcctgtgattcaaataagctttttcttggtgtcctatagtatttttggctgtaatctacaaaagcagtattcttttaaacatcaaatcacaaatacactgatttcatgttacatataaaatttgtagaaaagctagggatttatgaacaactaagcagagttactgaccctctaatacatacctttgtattttagccttgtaccctcagaattcagtagtattcatttactaggagtgtgtttcatatgaacggtttggaaactgtacaaaaatttctagtcagttgtgtaacaatatccttcagtaaatttctccagcttccatggcatctgtttattacaagtaaaaagatggtgtcacccatagtccagaattttccaaagtgtttttcaaacaacagtttttatggctggatgggaatagattttattaatctattgccaaaaatgtataagagaacttgggttaaccacacttaaatgtgtttcttaacgatatgatttcttagggtttttaattcattagaattcattgaagtttattagagccttcttaaagaggggatacagtaatcccaattgccaaccattattgcagccttactttgtgccaggtacttttctgagtgctgaatatgtatttaattcacaccaactatccatgaggtttaggtactagtattatgacggttttaagtgtaagagagcctactcacaaaaggctgtagtaatctgtacaaagtctcatagtaattggtagtaccaggatttgaatacaggtagtcagactccagatctcttcttaacccatatgctcattttcttccatagggtatagagaatatagaatgcagaatgtctcaaatttgactatataaaggtgtagtgctttttgttctttttcaaggtatctctcacagctttacagtatatttattaaatttttgtgctcttaatttgttcagaaatgtcttaacctataacttggctgaaattttagattgtctgctaacagtctcagtaagacattagattacctttttcacagctgcagtcagatctttttttgagtgttagatttcttatagctttttaagttgatggtgagaggcaaaaagaaaaggaagatgtcatacttttcctcattaaagaatagcttcagcggcattgccacctcaaagtttaaccattatccttccctttcttttaccattttcctttaccacttatatctaagtccttattatctcttgtataatttaaaaaaaatgttttttttctcctcctatactcacacaacacagagcacttctgtgaccatgtgtgtgaccagtttcccctcatattgactgattctcgccagcttggtgtccagaaattcagttcagttctgtcgccgtctacctggagttagagtcaggtcccacaagttaagggctcagtcctgcaaactgccattccacttcaaataccagtcgttaagtcccaccttctggtacttaaaatatatatatataaaatataaaatataatatataaatatataataataataaatatataatatatataaaatataaaatataaatatatgtatatatatatatatatatatttttaaagacaggttcttgctctgtcacccaggctggaatgcagtggcatgatcatagctcactgcagcctcaaactcctggcctgaggctgtcctccctcctcagcctcccaaagtgctgggattacagatgtgagccactgagcttggccccggcctctggtattctgactgacttactataaattgggggtggggcggggcggttcccacgaccccttccttgagtttggtcatttgctggaatgggtcacagaactcagggaagcatttaacttactactgccaatttattacaaattacagcaattacgacaatttaaagatcttaattggttttatttgtgattttagatttgagcaatacttcattccataaaataaaacaagtgtttcagtgaactgagcagaggagcttggttttatagagagagagggactgaggaaagcaaaaacaaataataaaaagtggattggtcatttcaaagttactttcctagtaaggctggagaagggcagaacaatagagaaataatttattggctaacatcaggttacctcaggttaccctttgttgtaaggattaaagacatcagcaccgtaggagaggtttaccaaaaaaaaaaaaaaaaaaaaaaaaaaggtggcggggggtgttaaacacagggagcctcattatcatgccaattgaaacaggcttatttgggaaattagggtgttatctctctcctcatttcttggatggtctgataactcattttcagcttgatgaactcagcatgaaggactccattttgattttttttttctatttcaacagtttcaatgaaagtttgtatataagattactttattcctgcatcttctcaattgtttcttccttgtattttggccttttcctttcttacttggtgagatttgactttttgttcaaggatctttttgcggtctttgtccagttttaacctagtgataaccactatgctggcgtgaatgcctacgtggacagttgtgccattagccttttcccatggcacctgttcagtgttgatgatatatttcaaacttcgactaaattgccagtttgctgacctttatagtgtcctcgcacaatctgaaatttatcatccttttgcatgggcatggaatgaacgttgtacttctgtcttagctcttaggaaagaggggaggacataatcttcctatgaatgtgggaaggtgcattgaaacaccttttgtggttcttgcttcagtcagaagttacaaagggattaaactttattttggccactcttgcttcagcagtggccacaaaagggaagagaactatatgctacttctggttctatctgtattttgatttttagtctgatctgttggggcctagtgcaggagcttagtccagaacaatgtcctcctgtaatttttgtttaactgtatatatatatggagagagagaatttttcttattttttgaagagacgggatctcactctgttgctcaggctggactcaagctcttgggctcaagtggttcttccacttcagtgtcccacatacctgggactagagatgtgtaccactagacaacattttatttaattttttaaaagaggttagatcttgctatgtcgcccaggctggatttaaactcttaggctcaaatgatcctcctgccacagcctcaccagtagctgagattacgggtgcatatcaccatgcccagctcaacaatattttaaagaatacaaatgaacaactggatgaagagatgcatagggtgaagtatgtgggaaggggtacagagtttccacaacactctgtggtggatgccttatcctccacgtgttcagtaacctggaagctctccaacccttgctctttcaggtttttatggagattcattatttagggatgcgtgattaaattgttgatcgtttgtgatcatctcagccttcagcccttcccttcctaggttaggaagtagggctgaaagttccaactgtttaattatctggttggttcccctggcagccagcacccatcctgatgggtctgggagtccccagccattggtcattttgttaacatacaaaaatatacttatttcagagattctgagggttttaggaattgtatgccaggaatagggacaaagaccagaacaaatatatactaaaatatcacacatttcttctcttttgttcatgctttcattttattttctctggatggactgttgcagaaaccatgtcattggacttaaaagccagcttcccattactacaacacatttacaactattctccctactttgagtttaactctgttaaattcatcctgtctatattgctgccagggttattttgctaacgtatagttgagcccccattaaaaaaatacttaacagtaaccaaagtttaagtgttcagtatgttatcacccagacagattctccttttctccctgtccagaaaaagtcaatacactgagacagcaggaggtgtagcagagaaagagtttaataattgcagagtggctgagcaaggaggatgggagatatttgagaaatatttctcaaattccaactccttgagaatttggagatgagggtttttaaaggatagtttggtgggcaggggctagggaatgggtgctgctgattgcttgggtcagggatgaaatcatagaggtgtcaaaactgtctttgtgcagtgagttatgctgagtcacttcctgagtaggggtcacaggaccagttgaattagtctcttggtatggatcaccagcctgggtggtagcagttagtccagcagaatgcagagtctgaaaaatatctcaaacactagtcttagatttcacaatagtgatcttatctataggggaagttagaaatcttgtgaccacttgctagtgactcctgagcaataagcaattataaaaaacaagacagggaacaatggttgctgtttatgcctaaatcttagcagaatttaggctcctactgtaattctaaccttatagcctttcattagctttacaaaggtggtttcagtccctgaacaaggagggtattagtttcaggaagaaactattatgcttgctttaaactataaaataaattcctcccatagttaggttggcccacatatgggaatgagcaaagacagcttgtgaggttagaagcaaggtggagtcagttgtgttagatttctctcactgttataattttgcaaaggcagttgcaagtataacatacattattgaattttaccagtgtctttcttcattgtctgttcaaagttacgaaacagtccacaagatcaccattacttctgacaccaactgcagagttccgtgaaaacccaaacataggggaaaatcacatgcccgctgagttgattttttaccttctgtaatcacagtggtggccctccaaacaagatgctgtccattcaccttggaattgtccataaaccaaactgctctttactgattaatagaaagtagtttatagtgtagcacccatccgatcacaggatcagcagctcctcaggtagtttcaaagtcagccttagggaaaaagaagctacctgcttataaatataatgagtacctctttgcattctcctggttgtaaatcctgtgcaaactatttctattttatagggaactcttctggacactgccttccttattagtgtttctccgacatcacctaagatattatggctgttttgaatttcaggattattttatgtccttcagtcatagattcagtctcagttaatgcctgtagtagctatttttttctacagtgttgtacattgtactatggcatctggacatcttctggtccaaaaatcctagtggttgctgctgggtggcactcatagggttttgcccataagctgtagtctgcattagtatgtgtggctgacacttcccaaaatcatggcggaatgtccatagggccggacatggacaaaatcatggcggatcatagggctggaaagtatttagagagactactttctgcagttcagatacagcctgtctttgatcaggcctcattgaaatgtaggcctctttttgggagttttattgataggagcaagcagtattcccagatatggaatatgtgtccttcaaaacacggatatacccaaccaaacactgggcttcttatttagtgctggggtaggtggctacagcagtatatttttctttctctgttgagtatcacaggatgcttctactctggttatttctaaggattttttcaccatttaggcatgccgttagacctttgctggatttatcatacagctcctgttggtcacatgtcatcactgcttttttcccctaattccccaaactttttatcaccattgcgtttaaattagtcctgccttggtcttcagtttctgatagtatcatgacatcatcagtatactatattattacatgtggggacccgaatcaactctaaatttctcctaatcaaattatgacagtaagctggtgagtggaaataaccctgtggtgatagagtaagtgcaaattgggatctctcccactcaaaggcaaattgtggttggctctttttgaggatggaggtaaaataaaaaaagaaattcacaagattagtccctgagtactgttttcctttggcctgctatatattttatatgttttttgtactgttgagaccatattaggaactgctgatgctatggcggaactacttcaggctttcatagttcactgttagtctccatgagccatctgcttttttcataggccacacaggattattgtacaaagaattcattggcaccagcactccgttgtctaattcttcattaaaatggtaatttctttttgtccaacaggtaatttcatcaggcagtaccttacactgtccaaaattaacaacttctgagggcctgggtggttctggtggttcctaattagcatttctcatcaacattgacctcaaggtgaacttacgtgctttctgttttcaatattagacaggtgtacttttcagtcaaacatactgtctatcccaatagtacattcaggtaatgaagacgtaaccacctcacataaaggcagctgagacattctagttttaatctaaatgtttaccttaatcccattagctgtcacctttcaatttaaccttaacacctgttaggacttcaacaagatttagaattatggtgccttgggcctccctgtcaaggagttttagtaaggtctcttatctacccctggcatttttacccacacgtgtatattgccttagttccccagttgctggttgacctctctgtcttcatcttgagtaatctgccagactattgtcccaggcaatttgaggtcaggttgcttattgtcatctttgttccctggctttttaaatcttcccaaactggggtaaaatacagcatagttagtttaaggccctttaatgttgggaactagctggggctctcattggtttatccagtcccatggtaatgctgcattaagacctttgtttcaattccatctgtgttcaatttattcatcccattttaaaacaaccatctgtagatttccatcttcctgggataaattccttgacctctactctactatttccctgttttcttatgacttaactctgattttcttagcatctgttaagacctgtaaagggaagcttagacaatacttctgataaggcttctcagattattgctagattttacagcagtaaggttacatgggggtatccatgcaaaaggggccccctcaatcacagtatttaccatataccataaggcatactgagtcatagtcatgtcactcatagtcatctcctgactatcccatcatcatgtcagtccagtgtagcttgcataagaagcttatcagctgcttattctggggagttcaatttggcatttataggaggaggaggatagttgcccttttcaaggtaaacacactttacagtggcttttatatctagtccactgggctagctgtccccttgggaataacctgctggtgtgtctggatcatgtatagccttctctggttgtacagtagtgagctgtgggtctcgcttcaacctagacacactcttccattctacagcattaaaaaccaaagatcctgtgcctctaagtcaatcactgtcacagtccattttagtaaaggtttttattccagaagctgatagtgttgatcaacaaaatgagacaatttgtactataatccctggtttcagtagtttcttggttttgtctttctcatacctagactacctccttgtaactggaagtcacagacatgctatctaatgttccagcataatttttccttttggagtgaccctgagactagtgactgcagcccagactggctgaagtctgagcttggcccagtgtcaagatctgtcctaacattctcttgtattttcattttagctagtacaggtagcagtaacaaaggaattgtttcattaactttttttttttttttttagaggagtcttgtgctattgcccaggcttcgagtgcagtggctcactgaaggcttgaattcctgggctcaagcagttctctcacttcagacacctgagtagttgggactacaagcatgtgccaccacatctggctaattttttatttttttgtagagatgaagacttcctatgttgcccaggctggtcttgaactcctgggctcaagcagtccttcctccaggacctctcaaagtacttggtatataggcatgagccaccatgcctggcctactttttttcttattagtttgcatttccttgtttatctggtggttcaactcctctggaattgggtctaccatttctaaattccattggtaatttttacctctagtaactgcagctgcagttatacaaccataccatgactgggtacccatccaagaattaaaggtttatcaattcccaccttctcatcctccctcttcgcaaaccacctgttttagtaagccagggtcattcaattgatcccacttctgatgctaactataaaattagagagtaatccacgagactcctttcacttctgacaccacttgtaagatcaagattccctaaaactacactcaggtttgataatttgctagaatttacagaactcactgcaagctgttatactcacagttatgtttattacagtgaaaggatacagattaaaatcatccaagggaaagatgcacagggcagagtccaggagagttccaaatgtgaagtttccagttgtcttctcccagtggagccatggacatcataaacacctcctgatagtgatgtgtgacagtgtgcacaaaatattgccagccatggaatctcacctaaaccttggtgtccagaatttttattgggtcagtctctgtcacatagatgtggttcaccagccacatggtagacctcagtctccaggacagctcctcctgaggttgatatgagactgtgtgacccagagctcccactgtaaatcagattgttgacacagactatctagcttggctcaagtccccaggcaaacaaagataatttcatcaggcaggacatttcagggggttagagattacctgccagggactgaaggcaaaggctagatctctctttgggcaaagttaacttttttactaaacaatctcttatcttccacttacactttagtagcaagaaccctctacctaaccctccaactttgtacatgcggtttcttagacctgtatttattaggagagccatttaaccttaaaacgagttcacctctttgtatctttttttttttttttcctgagacagactctctctgttgcccaggctggagtgcagtggcatgatctcggctcactgcaacctctgcctcctggattcaagtgattctcatgcctcagcttcccgagtagctgggattacaggtggacatcaccacgcctggctaatttttgtatttttagtagagatgcagttttgccatgttggtcaggctggtctcaaactcctggccttaagtgatctgcccacctcggcttcccaaagtgctgcgattacaggcatgagccactgtgcctatccacttctgtgtgtcttaactaacgctttctgctccattcttttccctccctaccaacaccccctcttcctcgctctggacttaaggacttttagggcgagttctttaagaatctcaatttcttatacgcttattgagtcagtcaggtcttctgtctcttctgggttgtttgtttttaggagacagggtgtcttgctctgtcacccaggctggagtgtagtggcatgatcatagctcattgtaaccttgaacctcctgggctcaagtgatcctcctgcctcagccttccaaattgttatgactacaggtgtatactaccatccctggctaatttttttttttttttttttttttttaagagatggggtcttgccatgttgcccgggtcttgaactcctggcctcaagcagtcctcctgccttggcctcccaaattgttgggattacacttataagccactgcacccagctcccatctcttcttgagtcaactttgcaattgtgataatttatattttgttagaaaattatttagtagaggttaaaaaatgttgaattaaacattaagattttatgaagatctgtagttatatcttatgattgtttattattattattacttttttgagacagagtctcactctgttgccaggctggagtgtagtggcgtgatctgggctcactgcaacctccgcctcccggtttcaagcgattctcctgcctcagcctcctgagtagcttggactacaggcgcacaccaccacgcccagctactttttgtatttttagtagagacggggtttcaccatgttggccaggatggtctcaatctctcgacctcgtgatccgcccaccagtgctgggattacaggcatgagccaccatgcccagcctgtttatgatgttttctagctgagtttatttcctgttctttattagattggccataagtttgtggtctttattggtcattttagtgacccagttttttaattcatttattctttagaagtgttctgatcctcacagttttcttttatctttattaattttttgcttagtttgattttgctgtattctttttagaatcttatgtgaaacctcagttaatcaaaaagatgtaaattttcctctgaatttagcttcattccataatcatccatttatacagtctaaaactgtgttttgttttttcttgcctctccctgctttttaaaatttttgtttaaattaaaataattgctgcatagtgaaaaagatgagctatgttttgtgtgtatatcttttaagtgaaatatactgccaactttataaggttgttgtgaggattacaagcactgagaattgtacctataaagtgcttagcatagtaagcactcaataacagtttagctattattggctgttattacagttgcagcccacatgttttatttttttctctttatttaaattttttttttaattgaagtcttcgatttactttatggctttagaagttgttttgaaaaaggaaagcagctatagaactgcatgaaattttgtacctgagaacattactaggtttctagataaaccatggggtttttccatctccctccaaaaattctattcacattaaaggaattaaaaaatctgtagacttacaaagactaagaatgggagaagagacatcaatggggatttcagtccttttttttttttttttttaaagcagggtaatgaatggaagatttggtggatctgatatttgacctaatgggattgaatgatctaaggccatgcaaaggagatatgaaggaagccaatcaatatatttctcaggaacctgtaatacctagtacctagagatgataggtgtcacaaaaaatggacctattctctggagaaataaaatcagagaggcactggacttggggatattaggtccacatggggaggaagtaccaggctgaaatcagggagattaagtataaatctgtccattaagctctggggaccttcagtctccctgacttgcttccatattgctagtaatggcgctttttcatttcactgtcccttcctacctctcttttaggatttagagaccttttcaccctcggaagaatatttaaaagaaaaaaattacgagttccagcagaccagtataaattatagaaaaaagaaaacaaatgttgggaaattattagataactattgcaagaaattcatctaagaatgtagagtcaccaggataaaatgtcccatttaatgcccagaacaatgatttttaaaaagacccatatcaaggtgtataacatcataaaatgatagtatgctatggattaaggttaagatcagtgaagtttccaaaaccagcaatgaaataggaatcaaaataggaacgttaggccagacatggtggctcatacctgtagtcctagcactttgggaggccaaggcaggcagatcacttgagctcaggagttcaagaccagcctgggcaacatggtgaaaccccatctctactaaaaatacaaaaaaattctagtaaatttttagtttccaaagccagcaatgaaataggaatcaaaataggaacgttagtccgggtgtggtggtgcatgcttgtagtcccagctactcgggaggctgacgcacgagaatcacttgaacccaggaggtagacgttgcagtaagctgagatcatgccactgcactccagcctgggtgacagattgagactttgtctccaaaaacaaaacaaaacaaaacaacaggattgttaaaagaaagtcgggagatgaagggcaaaggttttcaatctagtattctctttttttgagacggaattttgctcttgttgcccaggctggagtgcgatggtgcggtcttggctcactgcaacctctgcccctgccgggtgcaagcgattctcctgcctcagcctcccaagtagctggggttacaggcgtgagccaccatgcccagccttgatctagaattctgtagctaaagtataaatcaatgtgagaataaaatgtagacatgtttcatcatgcaagtattgagaagctttgcctcttatgtacctctttttggaaagccattagagaatgtgattcaccaaaataagttagtaaaccaagaaagtaaaaggtaagggaatgcctaaaatgacagccatggggtaagataatttagaatgaggaatgaaaactgaggatcctgtgaagaaggtctccaggaaaaaaatggaaccatgtctattaaatttgttatattgggtcatttgaaaaataatgctgacaagtttggcatgtggtagttcatgagaaacattagcgattgcagcatggggcaagatggaataaatttggagagaatatattttggagaaatgtatttatttctcctgaaatgaatagtcacttttaagaccacactctcttactcttcaatcctcgtttgaggtggagatagggttgactcgctgaaactagaatttcttttccattgacagttttacaagaggaagacccaaactgcatccttcattaccaccaccatttgcagcctctccatcattatcagccttgtatctactagactaatattgttacattttttatctgtatttttctgttacccaagagagtgccacaagtgccacactcccagacgtcccctcatctgtcacactttaattccataggctctacatgtgcctgattctgccactttgtcctttggaattgttggcatgtcatcagaatctgcatatccccagcctcttttttgatccttttctttgctttatttggcataatggacactgcttctcttgcaactgtcgtgactggtgactttttttttctttcacatctcgtgtatgactgggcctggaggtatgagatacgtctttttactgttttttttagaccattctttctctttactccctgaaatatccggattttaatttcatgtcatcacccataacctctcattgctgctgtcatctaaaaacccttgggtcattccccttcatctctcaaaggtttttttccctaactcagtggtaaactgtagaatgctactattaagtcctagcaattttaatatatgtggatttgatccttcagacactctagtctttgtgttctttgacctcctttccagtgttcttgtcatttacactgctgtagccactcatatgcatagtcatatactagatcttatcatttgtaataattctattcaattttaagcattcctctctgtggccacatctgttactccagctcattctgcttagtacgaaacttctacaattattcaaccacacagtgacttttattttaatccattgatcctactaccctttcactttacctcatccctttgtgatctcatttaactccttccttatttaatgtcatagctaatcagtttaatcactcccttgcatttagccttgactcccatatcccactttttgaattcacttggcataactacagtcctgattaaacccgacttccttcctatcatattttgtttatccagctgaatatcacaggagaaaaacacattctagcataatgataccaataggtcacattctcaattcctgaccacttccctcaagtagaccgttaatgttgtctggaagtcatattgtatattcatacctttccctcttttaaatgtcaaatacttcatcctcactctgaaatactggcatttgcttccaacttcactgagaaaattgaagctatcaaaagagaactacagactccctctaccacatctacttttccaacaagcacctgtacccatatttctacatttctgttatcttagatgaactctcttcctttagaaagctaatttctctacttatacactgagttccatcccctctcatgtagccaatgacattgtttcagaaatttgcccttctttctgctaacctgtcagtttttcagtctctaacaattattcctatatttcagtatgctgctgtttttcttccatttttaaaaatgaaacacgaatccttctctttaacttcctttccttgccatcagagctgtccctgaaaaacttcttgaaagaattgcttgtaattatggtctctaattcctcctgtcccattctgtgtaaatttacatgcttttgactgtcagcattgtaccaacattgctcttttcaaggtcatgaataaccactacatgactaaatttagaagtgttttctcagttttcatcttgataccttattgtatcagcagtatttcacatgtttaatgttccttttaacacatttatgtacttggctaccagaagaacacattgttttcattttcttcctactaattactgattactttttctcaatctcatttgcttattttgtttgttcttctaggttggatgtacgagggtttacaccattatctatacgtatagtcttagggcttaaaataccatctatatgttattgatttccaaatttatatttctagctcattgtttattcctgaactttcagatttgtctgccctacagactctgacatctcccacttgaatgtctactttttcaaacataacgcttccaaaactcaactactgatcactttctccaaaccttttttcactggtagcctttcctcatctcagtttggcagttgcattttttttttcagttgcataggccaaaaatcttggcaccatcctcgactctacttgtttctcatacccaaatccaaacttatcaggaaatccttttggcttcaccttcaaaatatatcaccaactcctaccacgtactacctctgttgcctctaccctggtctctgccaccatcatttcttgcctagattactgcagtagtctctatgcttctaatactacctctcttccatttattcttaatacaactgctagagtgaatcctaagttgggctgtatcactcccctgctcaaaacctgcagtgactcttcagtcaatctttatagtggctttaaagaccttatacacgcattttatctgctactactctgcctatccctccatctctgctacagctacactggctttcttgctacttctcaaacatttcaaccttctgggtttaagcaatccttctgcctcagcctcccaagtagctgagaccacatacagctaatttttgtaatttttatagagatggggtcttgccatgttgcctgggctggtctcgaactcctgggctcaagtgtgatcctctcgcctctgcctcccgaagtgttgggatgacaggcatgagccaccatgccaggctcctttctctgttttttaattggaatgtataatcttgttatatttaatataacttgtgatatggttaaatctaccatttagtatttgttttttatttctctttttttgtgttttgttcttttgttgtctctttgctgcattattttaagtttataaatagtttttggtgttccattttacatctactgttggctttttaagctgtactttattatttttagcgattgctgtggggatagtgatatgcaattttaacttaatgtctacttaaaatattgtatggttttagtaactttacaaaaggattattcattttactcaattactatcctttgtactattgccacatcatttattcatgcattatataccttaacatacaatacttaaaaaaaaaagctgtcttttaaggaagttatgagaagagaaagtaaaagctggtgtttcatatttaccaatttattaccatttctgtttcactttattccttccagtatatatgagtttctgtctcttatattcctttggtctaatgaatattctccagcatttcttgttttgcaggtttgctgacaatgaatactctcatcttcttgtcatatgaaaatcctcaatttaagctgggcacagtggctcactcctgtaatcccagcactttgggaagctgaggcaggtggattgcctgagctcaggagttcgagaccagtctgggcaacatggtgaaaccctgtctactaaaatacaaaaaattagctgggcgtgggaacatgtgcctgtagtcccagctacctgggaggctgaggcaggagaattgcttgaacccaggaggcggaggttgcagtgagctgagatcaccccactgcactccagcctgggtgatcaagcgagactctgtctcaaaaacaaaaacaaaaaaaatcttcaatttagaaggataatttgctctagaattctgggtgggcagttttttctttcaacattgaaaagatattgatattactactttgtattctggcttccattgttttggatgtcactcgtattgttccttcctgaatgttttatggcttttctctggctgctttcaagatttcctctttttctttggcctttcccttttgaccatggagtttttagatatgtttgtctttctgtttatcctctgtggcgttcgctgagctgattttcatcaaatttgggaaattggccattattcctcaaaacagattttccagccagttgtggtagctcacgcctgtaatcccaggaatttgggatgctgaggtgagaggatcactttaccccaggggttcaagaccagcctgggcaacatagtaagaccccatctctaccagaaaattttttaaaattagccaggcatggcagtgcttgcttgtagtcccagctacttgggaggctgaggtgggaggatcgcttgaggccaggaggttgaggctgcagtgagctgtgatcatgccactgtgctcactccagcttgggtgagagagtgagacctatctccaaaaacaaaaaacaccccaagtctcctaggacttcagttacacgtatgttagactatttgattttgtcacaagggtccctgatgattgttcatttttcttgaatttattctctccctctcttcttcacactggatactttttattgatgtgtgttgatggtcacataccctttcttcagacatctcccatttgctgctaagtccatccagtgacgtttttcatttcagttattgtacttttctagaatttcctttttttcttttagtagtttccatctatctgttgagatttcctgtcagtttgttcactaagaacctatgttcatttaaaggtttgaataaatatacaatagcccatttaaacttttagctcattacagcatctagatcatcttggtgtcaatttgtattgagtacttttttctttgctgtgagttaggctttcctatttctttgaatgcctgataattttttattgtgatttggacattgtggacaatacactgtagaaattctagaaattttatcttcctctgaagacttgattgttcttgtaggcatttaaattactgtaagcttgtgtatgcttggttttatgctttgttagggaagatctgtagaaagcccaagtcatttcccaagcctttctaagttggtggtacccaatttctgaaccttgtttcttagacgatcttgtcaaggcttggttttatttaggttttgttaggacaggcctaaggtacagcttactccagggtatagtcctttaagggtgacctttctggtttctcaggtagatcccagggagattaacaaagtctgtctcctctgaagatagaattcaagctgagttcttctagaaatccatgacctctagttcttctcttccagtgtcaactttatagcaacggcagtctgctaaactttgtgtaatctcaccctgtcatatatagcccagactttgaccaagaacttgtgaggaattcacacatattcaatatcttctcttccctctatctaccctctgttccccattctcatcctacatcattccctccattccagtgccctgccccgtggatttcagccactcatgagcccacaccgtgatttttgcctctgctctacttcgcctctagccccctgttccagttatcataaaattgtctacagacagagaggtaggatgattatgatgctctttaaaggaatgtaaatttttgtctgcatgtggttcagtgactgaatatagttgcctcatgtatttctgtcttcttttatagtttttggtgacaagggctagtctggtaccagtcactgtgtcctggctgaaagtgaaagtcacctttgttccaccttcatacattaattttttttttttttaagaaacagggtctcactgtgttgcccaggctggtctcgaactcctggcctcaagtgatcctcctgccttggcccccaaagtgtttagattacaggcataagctaccacacctggctccaccttaatattttttataccctattgcagttttgtgtatagttagagtagagtaattttagattgtttttgaagatactgtttaagagagagtggctacttaaaacctagtatcagatatttttattaaagagtaagatagtttatgatggtagttacttgaatgatataagtgaggtttctctaaaatattttcttaaagaaatagcttttcatcagggtgcagtggcccacgcctgtaatctgagcactttggaaggctgaggctggtggatcgcttgagtccaggagttggagacaagcctgggcaacatggtgaaacaccatctcattcattcattcattcattcattcattcattcattttgagatggagtcttactctgtcacccaggctgaagtgcaatggcatggtctcggctcactgcaacttctgcctcttgagttcaagcgattctcccacctcagcctcctgagtagctgggattacaggtgcatgccaccacacctggctaatttttttgtatttttagtagtgatggggtttcactatgttggccaggctggtcttgaactcctgaccttgtgatctacctgcctcagcctcccaaagtgctgggattacaggtgtgagccaccgcacctggcccccatctccattatttaaaaaaaaaaaaagggagagaggaagagagaagggaaagaagaaaaggaagggaaggaatagcttttcttagaattggacttttgaattaagattttgtgtggataaacttgagagcagatattcacaattctaaatttatattaaaagtagggagatttaaaaaaatatattgatgcctcattcctattccaggctagttagataagaatcttatattatggcctggatataaaaaattgtttttacaatcttttaagaatactggtaaatcatcccaggtagtttgcattattcatagctttaaaagaacctttgctgaaactcacttttttagttcttccgtaaattcttctaagagttttttttttctttttttttctttttttttttttttttgagacagagtcttgctttgtcgcccaggctggagtgcagtggtgcgatcttggcttactgcaacctccacttcctgggttcaagctattctcctgcctcagcctcccaagtagctgggatcacaggcgcccaccaccacgttcggctaatttttgtatttttagtagagacagtttcaccatattggccaggctggtctcaaactcctgacctcaggtgatccacccacctcggcctcccaaagtgctggggttataggagtgagccaccatgcccgaccctaaaaattctttcagatgcaatccaagtagttgaagaatctgaatacattttttgtagaagtgataagtaaatacatatctactgtcagtcctcttagggagctagattcagagctatggcaacaaataaagatttcctatccaagcataattttttcatggggtacacttattgtcagacaaaatggtttgtttattgaacttcactcaacaaatgagtattcattgatctcatttgttcggtagatattcaagtactcatcgtataccaggtaccttgctaggtgatagctatacaataatgaaaaaatgtgctctgtccttgctatcttggagttgtgtagtctgtatgagactgatactgagtatttggttccgtaatagttcatcccttgagtattctttaaaatttgaattaattcatttgggtattgctgaaacatagcctcattaattttcatattatagtttctgatcctattaggatatcaaactatctgaagagcccataggttcaatgagtcagttacccagcagaatcattgcttatggctagaaggagaataattccatatggctaagagttaacttgaaagagaagaatatcaggagagaagacttgaggaagaaacacattcagagtcgttagtttcacagataaaagttacccatttggcaaagagggcagatgggttgagaagtatcccatgtgaaaattttattaaatggcaaaattattgcaaagaataaaaccaattggtcattttcctttgcaaaaatgcagctttacctctgattatttacagctcatctgttatctctctgtgcatgcctagttcctatctttgaaataattgtacgttgtcatcacgtcttcaagagttcccttctgtgcatgtatccaatgtagaatgtttagccacttaacgtcctctctatcacatcaccctattcaaatttttgttttctccttaattaaaatgtaaggaaaggaagaacaggaccttattttaccttatttactgtggtatccctaccctttgaatatttcttggcaaataggcaaatttagttcatataaataatgactacatacttttttatttttaaggggatgaggtctcactctgtcaccaaggctggagagcagtggtgtggtcatagctcactgcagcctcaaactcttggactaaggtgatcctctcaagtagctggaagcacaggcatgtgccaccacccccagtcattttttaaaatgttttgtccagacagggtctcgctttattaccctggctggtgttgcacttcaggccgcaagcgatcctcccacttcagcctccgaaattgttgcggattacggggtgagccaccatgcctggcctttgtattttaagagtcttaaaagtcttttaagagtcacaagatacgtaatttatacacagaagtatacctaaagaaactgtgtaaagaataacaaagatgtctttaaaaatgtgcgttgtgattgtgtctttcaatcagtaatctcctcacatattccatgtgttgcattctttgttggtccttcttctggaattccagttagatgtatgttagactcccctcaatccattctccatttctcttaatgtttgtattccccccctttttttacattgaaaatgcaaaacagggagacacttttctctgaacaatctcagttcacaaatactctctttatgtctaaactgccattaaaacccatccattataatttaaatattttaaatcagccagctcctcccccttttaaaaactttatttttagatagcaaaaaaagttcaaagaggtcttttgtatacttcatctaaaattttaaatagttgcctgaacattttagctgtgttttattctttaaatagagtacatgtatttattttgcctctgttagtgagtcagttcttcctgttatttctgttgattcttgcttagggtgctgtttttccttatatatgtagtcttttaaaactatgaactttcctctttccttgaaaaattatgcaatttttttttttttggtctaaaattaagatactttctttccacaataaaggattgaatttcctgttgctattgcctagaagcactaccagtttccgacagttaaatttccggaatgaagttttgaaccaccaagatgatgtgcacttggtctgaaaattcacatgtgaagtgttttgtggatacaacttctgagggtctcccccctcctcttccacagaatcattgttattgtcattcagtctttttgaggtgatagaggggcaggttactcttagtatacccttatgttaaggtcataacacttttggatctctgctttgtagtggtataggttttagatctctgctttgtggtgacggactgtgaatccatcatcacagtcaaaatagtgaacatctttatcactcctagtagtttcaccttcatgttaacttttctggataaataattcaaggctgaaagttttctttaagtagtttaaagatgttgctccactctcattgtttccatcaagaaatctgttttatttttgttcatttgtatacagtgtatcttttttctcttctggttgcttttaatattttctctttatcactggttttaaacagtttggaaattatataccttagtgtagtcttctgaatgtttcttgtgcttgggggatgttgagcttcttagagctatagatcatcaaatttgaaaaacttttatccgtaactactatttctaatattttttctcttcctctgtttttctcctttggggatgccaattatacatgtattaatgtactaatgacttttcactgctcactgttttttttttgatggagggcttcattttgggtaggattaacagagattagattttttttttttttttttttttttttttgatacagagtctctctctgtcgcccaggctggagtgccgtggcgcaatcttggctcactgcaatctccacctcccaagttcaagttctcctgcctcagcctcctgagtagctgggattacaggcatgcaccaccacacccagctaatttttgtatttttagtagagacggggtttcaccatgttggtcaggctggtctcaaactcatgacctcgtgatctgcccacctcggcctcccaaaatgctgggattacaggcgtgagccactgtgcccagccagaagattagatattacaggagaaaagataaatgattttgaagacagcaatagaaagtgacatcctgttctaatgaagtcttaggtaattgaaatatcaggtgatgtcactgtgatttttgagatttaattagagttagcttttgctccctgttctatttatgtgaggattttaatgtctttctcatactttatagaaatttctaccctttcagattttcctcacagttgctcacatttcctactctctgtccctttcctgaactcttatggttgttatcatctccccttcatatagagctttaaataaggaacaatatacatttgcaacaagataaattctaacagtataaatcctttaaaattactgctaagaataacagtgatagcaagcattaaatccttagtatgccttaagtgctttgctttgtgtgttttgaccagtttaattcttaggacagtcctgtgcatgtatatatgatgattgttctgtattttactggagaagaagtgagacacagagggttgtcaaagtcatctagcttttaactatgaaaatagtagtagtatctaagtcattaagtttttctaaaggttaaatgagagaatgcatgttaagatacttagcccagtgcctgaaaatgtagtaagttatcagaataggctattgccatctatagattgagaaatgtttagataaagtatgatgtttggagttttcttcacagtagtctaagggatggagtgagtgggtgtatagataaaatcagctatgaatggatacttcttgaaaatgggtgatcgattcagtggaattagacttctaatacatgtttgaaatttaatgtaatttaaaaaaatggaataactgaagaaaaatgaaactgggttttattaaaaaggttctcttattcagtttggatataaagcactatgatgcatttttccctagatgtgccaaaatcaaaacttaatatatacagtgacaattactaagaatagtactgtatcacttggcaagtagagtagtagggcacaggacttagtaagaccataatgtacattcagaagtttgaagttattagctaagtgattctcagccttttaaaaaacacccatccatgtatatttgtatgcatgttgcccagactggccttgacctgggctcaagtggtcctgttacatcagcctcttcagcctcccgaatacctgggacttacaggtgtgggccactgtgcccagcaaaaaacacccttttattatttatctcctaccctttactcatgagcaccatattttcataaacttcttacaaaactgtattaaatataatttatatctcaataatttaaaaaagctaagcatgctgattaattctgatcaaaaccagataattttaccaggtttatataattctagccagaagcacaaaaagttttacttagtctgtcctaactaaatcctgggcatacatcatttttactttattttacctattttgaaatatggagaatagttcattgtgactaagaaagcccacaagaattactactttagactgggtgcggtggctcacgcctataatcccagcactttgggaggccgaggtgggtggatcatgaggtcaagagactgagaccatcctggccaacatggtgacgccccatctctactaaaaatacaaaaattagctgggtgtcgtgactcatgcctgtagtcctatgtactcgggaggctgaggcaggagaatcgcttgcacccaggaggtacaagttgcagtgagccgaaatcgtgccactgtactccagcctggcaacagagcgagactccgtctctaaataaataaataaatactactttaaaatgcaagattaaaatctaagaaattactttgaagtatttatgtattaatcaaaactacatttagttcatttgttggttattctttccccacatttcagctgtaattttgattaaagaaaattcagtttacctaggtatatcatatttaggaaaatagtgtgtgtttgcttgtttcttgttcacatgaatgtaacaagatatatttagaaacaggactttgaaaaatatttattttgggataaggggaatttgtacatggttaaattttatgaattagaattttgtgaattttgatactagttaacctttctatcaaatgcgtatatgttgacatcatcaaattcttcaaaaagattgtttttcatcacaatgtaaataaagctaagtcaaaagggttaacatggaatcctcatatttctgctttatttgttcagatttaacatagtaatagtttttattggatgtagagaaatcatagtatgtgggataaatcaaatgttgctctttcacgaaggaacaaacttcgggtcccctatctaacagtaaagcctctttaaaagcctcttgccaggagtggtggctcacgcctgtaatcccagcactttgggaggtcgaggtgggcggatcatctgaggtcaggagtttgagatcagcccggccaacatggcaaaaccccatctctactaaacatacaaaaattagccaggcatggtggtgtatgtctgtagtcccagctactcgggaggctgaggaggagaactgcttgaacctgggaggtggaggttgcagtgagctgagattgcgccactgcactccagcctggacgacagagcgagactccgtctcaaaaacaaacaaaaaaactctctgaaaatattcacgtgcttttttgtgctattagtatcttttttttttttttttttttttttgagacagagtctcactctgtcaccaggctggagtgcagtagtgtgatcttggctcactgcaatcttcgcctccccagttcaagcaattcccctgcctccgcatctcaactagctgggactacaggtgcacaccaccatgccgggctaatttttttgtattttagtagagacagggtttcaccatgttgtccaggatggtctcgatctcctgacctcgttatccacctgcctcggccttccaaagtgctgggattacaggtgtgagccaccacgcctggcctgtgctattaatatcttatacaagttataatgttgctcaacattgtagacagttgagctttaaaaatgttctccttaaaaatggttaaattgggctggatgtggtggctcgtgtctgtaatcctagcattttggccgaggcaggagaatcacttgagaccaggagttcaagaccagcttgggcaacatggcaagacttcatctctacaaaaaagtaaaaaaaaaaaaaaaaaaaaaaaaaaaagcgggtgtctatagtcccagctactcgggagaatgatgcaggaggattgcttgggcttatgagtttgaggctgcagtgagccgtgatggttccagtgcattccagcttgggtgatagagtgagaccctgactcaaaaaaaagttcagacggataaattttactacgtatattttaccacaataaagtcagtgcaccagcagttttctataacagaaattcccatattgatctacattttctctcctactgtcctccattcttcttgtacctcttgtatcccactactaagtaaacttccctttatcttaacaaactttcctttatgttaacaatttcatagtctttcctcttgtctgccttagctgagactttcattgaagaaacaatggacatttagatgctcatagtattattacttttgtgattttagtgcccatatagacaattacacagtaattgtgaactcatttccaatgatttgtttcttgactgtgccttagctaggcatttagttttcaggttgtaccatggaccttgccataactgacacataacctctcaaatctgctgatctcactgataaagtcagttccagcttgtttgtttggctgtaccaaccagtactgtaccctgatctctgatatgagttactgtcttagagttttagctggtctttcccttctattcccttctttgggtcttttatatttctgtttgatgattttcctagaatgtaaatgtgattattacattctggttagaattcttcagaggttttccattacttagagaattaaatgcacaaatagtgtgctatacttggcccttcacagtttgcctctggattttatcagttattgtctcatattctgacttttgtatatttttctttggccatattgaagtatttatgtgtggattttatcagttgttgtctcatattctgacttttgtatatttttatttggccatattgaagtatttacatgtctcaaacatgcctctgtacctagcataagatgctgttcttctctgctgtgcttttcttggtattgaggccgatttaggcagtggtttcttgtaaattatatatacgtgaattatatctcttgtcacagtatggtatcattttgtatttgtgactatttgttagtagtacaaacaataatggattctttagtccatgtaaaaaggacatagaaaaaaactaaataatatttgttgacttaataacttaaaaacctaataaataatttacaaaaaggaaataaaagtagcaaagaaaactattattctagcttcctagtagccaaagaaatgttattagagtctatatttgcactattatgattagaaaattttaacatatagcattcatgctgacaaagtaaaactggtgttgatgtgatgttttttattgatttaacccttgtggaaagtttgacagtacatggcatccagaactgaaaaattattttaagtgtaattataaagacaagataaagaataaaagtcagatgtaaatttgcatgttcattattattataattgcatttaaaaatgcatagttaggccacatgcagtggcccactcctgtaatcctagcactttgagaggccaaggcaggaggattgcttgagaccaagagtttgagaccagcctgggtaacatagaccttgtctttattaaaaaataagtaaataagtacatgtataattaaaagattaaggaactatatattacagtggtagcagtaattttgtgatgttggaactatgggtgatttcccttccttttatagtattttctataatgtggttacgctttatgatttaaaatgtatacaacttatgccaatatttgaatttttaaaaagatgtaatcctgaatcaacactctaatataagagcactcaaccattatctgagtaatttttttctttcataatggcctttcagggtcagagttggagggagatgggtgattgccagttaaaagttgctgttgagataaggtatgagtggccagcatagagttgatcacttaattaaggtttcaagattgactcatttagctgttctttatttccaaaatcttaatcataaatgttttgttttaaatgtagttttgttttggttttaaggtatcagtttttggaagaagcttttcaaaatcagaagggtgcaattgagaatctactggcgaaacttcttgagaagaagaattatgttcattttgcagctactcaggtgcagaataggtaagtttgttgccttaaaaccataattttaagaattactaaaaagaagtgggtccagtttaaatctgtttttctgctatattaagcatataaagaaaacatttttttgagggggaaatggtatgaatttgggattataatatttgtcaattaaacaaaatttaattgaccaaactcttgtatacccttttaggacacatctttgtctattttaataagactgtggtctgtgttaaaccttaaatgtggaaacaaataaattaatatggagagagttgacttataaaatttaaagtggagattgtgtggaagatacagtatagagaagagagtatcacgggtggaccaattatttccccatttgtaaaacaagcattgaaaacagtgcttatcttaatgagtagcattataagatgaatacatgatatagtttctggtacatagtaagcagttagattttagctgttgctattgtatttataattatcatcaccatttattatttaaaaagtattctactttggtatatttctaagtaaatttattgataagtgagagtaggttccataagagagcagattaacaaagttatgactcttacaccagaaagacaaacactttgagctggcataattaaaactaaaattcttcggggtatgaataaggttaatatgtgtttatagactcaaaaatattaggacttctaatgaatattaaagttcattaatttatgattaaaatgacacatagtagatgctcaaaagtattaaataattgaatgaatgaatgaatgaaaatagtactttacacatggtagaactttttttttttgagacggagtctcggtctgtcgcccaggctggagtgcagtggcacaatctctgctcactgcaagctccaccttctgggttcacgccattctcctgcctcagcctcccgagtagctggggctacaggcgcccaccaccatgctcggctaattttttgtatttttagtagagacggggtttcaccgtgttagccaggatggtcttgatctcctgacctcgtgatccgcctgcctcagcctcccaaagtgctgggattataggcctgagccactgtgcccggccagaactttttatcttaagtaacaccaaaagaaaataaaaggctccttagagcttgtagattgtacacacacacacactccattggtgggtttttgtttttggaaatgttcagttgttttaggttaaactggtgatacagttgatttggagaagactgtttctcagaaatgatagatggatgtctctttcaaaggaaatgtagtgagttgattcatatggcagtcccatatttttatacagatgttttgtgtgtacattgtataagtattttttaaatatattttgtacacgtgttccagaatctgtatacaaaagtagggcaagaggtttacctgttacaagattgcacggggttgaggagattgatttcatctgtagaaagtttttaaaaaaacagtattaaaatctctgataacttccccttttagacacatttttcactgacctatctccattattttttaatgtacatttttttctttcttcaaaactgaacatacagtagacttaattaaatccaataggagtctgactgagactaactactctctaactactctctgttttcagcatgcttagtgatttctatcttcagcccaatcattttatatttgaaacctatatttcttatcactagttattagtacctttatatattaaaaatatcttccactcaccttagtaagataaggacaaaactcaaaattttcaagtaagtgccaaacgatgtacagagaaggaaaaaaactacattatttcttggagtgtattaaagttaactaaattcgaacttggcaaatgaaaggcagtttaggagctgaaagcatgggttatagtttttacagaagtagaatgtataaaaattgaagctatgtcttatggttggtcgttgacattttatatatttatagtggtgggattatccacttcctgttttgtaaataccaaagtatcagccacttcatatttgcacctaaaacttccataactgctttgagtgcttacacctacttataaaacatctaaagctattcttaaaaatggattgaaaatgttttatgccctttactgtatacaaagggaaaccatattaagagtaattttgaagggagtgtatcagaacccatgtttgaagtggctaagttataaatgaaaataaatgcttctatgtttaactattatcctttcaaaagataattattgcttgtgacattgtccttttgcacattgttcttggaaaacgtcaaggttaaacagaaccaatgtgccacatttgacactatccagaagtcactggtgtttgtgcatcacattcatgtcatagttacttaagtagattgccatccagcttaataaactgtcctttatgagcataatttaaaattactaaatattagtttcattatttgtctatgtacataacttgtttggaccaaattggtcaggtctgctgaaacatgagttgtacattttgacaaagttttcattttaattactcggttaagtgcccagttggatgaatttctgtaacagttgatgattcagagacctaggataagttgataacctaatgatgcatttctcttattcaggataaaagaagtaaatgagactaacaaacgagtagaacaggaaattaaagtggccattttcacccttatcaatgaaattaataagaaaggaaaatctctcttacaacagctagaggtatggttcaaagccaaaataaaacaaaaactgcttctcttgctctttagctgtttttaatgtttattgaaaactattttagatggattggggggtatggaaataaaggaaaacgtaaaataaggtttttaaaatttacttttggaagagaccttttctagttagttactttgcggcccaatttaataacactgactttagctgtataccttaggaaatagtgatgtcctcttagaaatcaaataattgttactaagactgggtatggtgactcacacctgtaatcccaacactttgggagcccaaggcagacagatcgcttgagccccgggatccagcccagcccaggcaacatggcgaaacctgcctctacaaaaaatacaaaaattagccagggtggtggcatgcaccagtagtcacagctactcaggaaactgaggtgggaggatcgactgagcccgggaggtcaaggctgcaatgagctgtgattgtgtcctgcactccagcctgggcaacagagtgagaccctgtctccaaaatgaaaaacagaaaaagaaaaaagaaatgttactaaaatgtgatgtacgtaaaggcaaagtagtcccaccacatttcttccccacccccttaagatggggcctcaatttaattttaccatatagattcatgttgggcttctgcttgagtcatttgtgtattttaccttattttaaaaatatttccatagttttgcagaaaatgctgctctttttgaaatttataaaccttaaacttagtgaaaattttgtgatattaggtatttatattgcatattttgaagtttatttgtaggtgtaagtttctagatgaaaatctagtcagttcatgaaatctaaatttttaatcaaagtctccactgccgatttgatttatttttagcaaatttcaaataggagttttctgggaaattgaagtttcagaaagagaaatgtttcctgattgaaaatttcatgctctggaaagttgaaattttggaaagagaaatattttctgattgaagatttcatgctcttaactaggttcagatgatatggggattattttttctgcaccattgaatagtaataatgaaatgatttatttgattatttccattaacctcaaattgtcaatagtttttttttttttctgtcccatctcttcatagaatcctttaaaaatattaggtgaataattacataaaaatgaaatgatgtcagtagaatgttatctctgaatggaatacatctttccagtgaaacacaatttgtgagattaaaagtactcttggccgggtgcggtggctcacgcctgtaatcccagcactttgggaggctgaggtgggtggatcacaaggtcaggagttcgagaccagcttggccaacatggtgaaaccccatctctactaaaaaaaaaaaacaaaaattagccaggcgtggtggtgtatgcctgtaatcccagctactcaggaggctgaggcaggagaattgcttgaacccgggaggtggaggttgcggtgaggcaagattgcgcctccgcactccagcctgggcgacagagcgagactccgtctcaaaaaaaaaaaaaaagtactcttgtgcagattgttaaagttgtgggtcccttttcctactgtacaccagtctgttgcatttaaccctaataggtttttccccccaaaaggacccatgtgaatagagagcacttagtaactatttttgatacacttaaacttactgtaatacatttgagctgtacgtctaaaatagtatttgtaaaaccatttcaagagtttctgaattaaaagatgcttcttaagatcccttgagcctgggaagtggagtttgcagtgaaccaggattgcaccactgcactccagcctgggggacagagtgagactctgttaaaaaaaaaaaagcctcttaaggctaaagtgtatacaaatacctaatggtaaatacgccacatactactaacatgatgataaatttaaaatagatgttttctagtgtaatatgttcttatactttgtagaagaaacgtttttctaagctttataaaagaaatgtagtaaaccatacttctctcagttgaatactcttatccattgatttacattataaaatgaacagcttctttccttaggaaaaatattgtccagaaaaaccaacttgagtcatttttgggagaaagttcttaagaaagtagtagatgagttgttcagcatgctgaatgtcaaaagtatgtaggacattacccatccctcctggggtgattttagttcccataaagcagtttatttttcctttgcagtgtttctctgaaattggtttttgcagtttggtcagtccttacttctttgttctctgtgaacttctgtgatatcaaaagtttccctaattctactcttagaactctggaagttatctttttcattttgtcttatatatttaagagagattttaacttcattctcatgccataccaggaggtggcactggtgacacaaaatttttttggcctttaaagtatattaagattacataaatttatttctaaagttagctccttatgctataaataccatatattagattaatctaataggaagacactatttttaacagacatgttgatagaaaagtgacattaactaacattcatttctatatgtggaatatcctttttagcttagagaactgacttttagtcccacttttgttagtggcttttcctctgatgataggcttgctaaataatcatggagcttattcacttagcccatttttaaaggaagtataggtattgtgcccatttgcattagaaatgtggggttgattttttttcatatggaattctacagcgaagctcttgttctgtttcagaatgttacaaaggaaagacagatgaagttactacagcagcagaatgacatcacaggcctttcccggcaggtgaagcatgttatgaacttcacaaattgggcaattgcaagtggcagcagcacagcactactatacagcaagcgactggtgagacacatactgtttttatttttctttaatggactttattaagatatatattcagtgaattgcacctgtttaaagtatacattttaattttggcaaatgtaaccaccaccacatcaagatacagaaaacttccaccaccccccaaagtttcctcattccactaggcagccactaatctgatttctgtcattttttagaatttcatataagtggaattatatagtatgtactcttttgaagatacctagtatcttaatgcactttattacccaaaatggcagaaattcaagtatgtatatttgatttgattgctaatttaaatgttgatgctgcctaatctgaggctgacactgtgggaatatatgtgcttttttttcttaatgtctttatcttatgatttcccaattgatatttaattttgagactaatgtggatttttttccctttaagattactttccagttgcgtcatattttgaaagcacggtgtgatcctgtccctgctgctaatggagcaatacgtttccattgtgatcccaccttctgggcaaagaatgtagtcaatttaggtgagaaataatgagttttatgaatataacttggaacactgaattagaaggagaaaatacttaaagcaaatttagataaaatttttaactttataaaactaatgttttacattttatgtaaaaatatgttgttattcattggaaactcactttagctgtggttttgtgtggctgttattacatcttaagaaagttgagcgtctactctgtatattgttttttaatgtgtgctgtttctagtcccccgaccctccatcttttaaatttatattgactgtttcatatagaaatcttagcaaatgattcattgtctggaataatttcatagatttttagttgtttaattaagccaaattgtgcattagcaacagacttttaggatgctaatgtgtccagtagttaggtcctgaggaatgtttgaaagataagagtagctcttttcacatggaagagaaatggattttccttttgttacagcgtagtatggacctaaagaccatagatgaaagttacagagagctcagttaaaacacatgcacacaaacttcctagcaattagagagctatttacagattgagtaaactcactttcagaacagttaagtcctaaacagtgggaattgtaaaagcagaggctggttgccctttttttttaaaaaaaaaaaaaaagtaatctttgcatataataaaaaaaaattatattcaaatttagctatagccttagttctgacatcagccagctgtttttgtgtgacgtagtagctaagaatggtttttacattttcaactggttgtaaaagcaaacaaaaaccaaggactgtgagacagatcttatgtggcctgccaagcatgaaatatttactctatagcccattacagggaaagcctgtcaacctgtgccttaaatcacatcttcctaaaatttggcttctatccctagaaggcaatggctccataaaaagcaaggaaaaccatcacgtctaaggatataagttgtttaaagcattcagtatttccacagaagacgattttgtgacattgtaatgctctgccttgcatattttggcaattcaaaggcagatggaatcagtattggcaatcttgagtatccttgagtaagtcttgtcatgggagaattgatttagattgattagataggcctcttctaatagataatctcttttactgtcttaattttctgtatgtctaagtaaaaaagaataaggacagagagtatatttttctgaataaccaaacgtcatttattcagctttggaatgtattaagtttctgatcatcatcatcatctttaaactgactccattccctgctgtactgttggagctttgaggtgctgatagttgtcagaggaaagaggaaaacatggtgattactcaacaaagtagatgatttagttgattatatgcaaattctcattttttaaatttttcaggtaatctagtaatagagagtaaaccagctcctggttatactcctaatgttgtagttgggcaagttcctccagggacaaaccacattagtaaaacccctggacagattaacttagcacagcttcgactccagcacatgcaacaacaagtatatgcacagaaacatcagcagttgcaacagatgaggatgcagcaaccaccagcacctgtaccaactacaacaacaacaacacaacagcatcctagacaagcagcccctcagatgttacaacaacaggtaagtatcgtgttactacattattgatagaaattatgaagccctcaacactacactttttcctatataattaagttacacatttcaaagttactagcaagactgagcagagttcaaaagtcagagtttaaatatttgctatggttatgatggtgatgtaagggagctgtgaagaaaggcagtaagtaaattgtcttgggaaacaaaattaattcactaatactctgaaaggatgtaagttctcatcctttcacatcaaatcttttttgttttccacgtataattttgtggaccaaaggaccagactgtttctgcctaggatctgatatgttccttaggcatttgttcagatctttcctatacctgtgtgtcttttgctctctccactgccatcccaatcaaaactattactccaggatgggatacgttaatgttgatacgctttaaacacacatatagagaaaaagagggggaacaggtaagagagagagagagagacaagggaaattagggagtgatatacaaactagtcattaccagtcctctggggattggggctagcgataagaattatttatactttttactttatacccttttatcttgactgaattatttttatgattacattttataattgagataaatttattttaaaattattacataaattgcaatttctactttttgtagcctcctcgattgatcagtgtgcaaacaatgcaaagaggcaacatgaactgtggagcttttcaagcccatcagatgagactggctcagaatgctgccagaataccagggatacccaggcacagcggccctcaatattccatgatgcagccacacctccaaagacaagtatgcctagagttacatttgtaagaatcctacaattttaaaattaaaagacgtcattttcttaatcactttttgggagcaggtcattgatgtgtttgagaatttgattaatgctgtatatcctcttgtcccagaaaaataaacatacacatgagattttgtatttaattttaagagcttttaaaaaatgctttaagtgcatcatatactgtgggttaagaaaccctgatgtagttaacccattcaatttgcagaagtgaaaaaaatctaatgagctggtgattttacccacaatcacaaaaagcaatgataaaatagcaagaacattagtttcctgaaaatgctgctctgctcttttaatgtggctttttgatcctaatatataaaaagggctttgagagtaacagagctaactatatgtattattattattatttttttttaccttttctctactcaaatattcttccttttaggatgtagatacgctttaataagtgtgtttagagacatgttttataatctttgcctggttatgtttatatgggagatatgagtatacagtgaggccactttttcataggatttctagttataatagagtttattttttaactcttagaatgatgtttctcaaaacatgttttaaagaccatcagaatcaccagtcagctttggtggagtgggcaaccttgtcagaatggattcctagccataaccactgaatcagaatttctaggtggggagtactcagtaatatttaaatttgtattaagtctctcaggtcaatctgcgtactaaagttggagaaacactgtcctagaacagtggtccttcaactttttggtccatgtacgcccagaaagagctttttaaaataatgcgcttcttggctgggagtggtggctcacgcctgtaatcccagcattttgggaggccgaggcaggaggattgcttgagcccaggagtttgtgaccagcctgggcaacatagcaagaccccgtttctatttaacaaaaaaaaaagaaagaaaaaatatatactcgctcacatttgaaggctttcatttaaaatttccattataggtttaagtttaaatagtttcaaaagctgtactttatagcatattgtaaatattgatgctataaagttaaaaaaacctttgcattattttaaatgaatccgctggaattccagataccctagcaagctctccttggacttgaattacacttctacttcttcaacagagttttatcttactgtaagatagctttatttgatagatatagattagcctattgtaaatttctgcaggaaaaaaatttttttataataaattgttaaatttccagtgacaatagggttattattaagatttgaaactttttctgtggaccaaattatcgttatatctccacaattgttgaaacaaaatgggtgtgtttacatggtttaagactattagaagatacaaaactcttttggatatacatttctttgagctagatggagactttttacctcctgcttctggttatgtatgtttgtatgctgttacttatttttaaaataagtcagaattcaacattggtttttattactagttttttgggatttgtttttatgtaatgcttaggaaacgtttacaaaatttacaaattacaaaaatacataatttacaaaattatgtatttgggaattaaaagaattttattatagtaatatccctcaattctttgaattttttctaggttataggctgagaaaacgatctatcaaaactatttaaaaactttttgtcagtgacaacttcatttttgttaatcatcaaatattcgaacccatttgaaggtttgttacccaggttttggagtcagacacccaacatcgttatttccaattgtacctttgattatttctacaggtttttttttttttccttcctggtgcagtgtgcctagaataagatttaggaatggtcaaaggtgtagtgttcttttgtcaaggatggaggaagggcagttgcgaaagtggtggaaaaggagatccagcagagcatggcacattctcaggcaaatcagattttttttttctttttaaagagcacatacaaaagattgatggtctgaacatttatttccttcacacttttcacataatcatgtaccccttagttcatggaaggccttcaagtatttctaggggccaagtacaccttgtcagagcgcagaagctacacagtcagactaatgaatcatctcagaacattttccttagactttgggtatacctctacagaaatcactggatgttattaagcctttttagtttttaaatatttcaaatgatttatttatatgtgtagaattcgttttcttaagattttcttctatattgtcttaaatgatcctcataacagccctcacaatgaaacaagtgaggtattgttatccacatttctaaatgactgagattatgtgatttgtctaaggtcacacagtattagagtcaggacttgctgccatttttcttttctgtaaattcattgttctttctgccacttcaagctgcattatatatcatttttattggaaaaatgactaaaggtcgaagaggaataatgaccgaatggtagttctcttaccccggtgtttgaaaatttggaggtttacagatcctctattacatacttccttcttctgaaataagatcatatcaccaggctgatgtgttgggaaattattggcaagtctgcctttccctagatactatacaaaaatgaatagaaaaatgaaaaggctgagtttgaactgttcttctcctgaataagtttgaaagggcccacttctttgtttcttctgtttccttcctaaactaaaaattataaaggtatagtttatattcagcgattctggcagatcaagtaatgataatgtcttctttcttattagcactcaaacccagggcatgctggaccctttcccgtagtatcggtacacaacaccacaatcaacccaacgagccctactacagcaactatggcaaatgcaaaccgaggtcccaccagcccatctgttacagcaatagagctaatcccctcagttaccaatccagaaaaccttccatcgctgccagatattccacccatacaggtttgtatttgagttgaatgaggcttcattaaacttaatgttaattacagagttagagtatttatttcagagttttttttttttaattcaggatcaacatttccttgaaatttctgaagagtaaagtctaaatcactaaaagtctccttccagtctaagtgaaactttcatcaacatcctctctttccgcattccccgcctaccctctcctctagcctccagttaaccatctttctatcctctgtttctatgagatggacatttttagattccacatgtaagtgagattagtcagcatttgtctttcggtgcctggctgattatacatagcataatgtcctttggttccattcatgttgttgcaagatgacagaatttccttctttttagaggctgtatagtatattccattgtatatgtctaccacattaaaaaaaatccattcatccattgatggacatttagattgcttacatatcttggctattgtggataatgctgaaatgaacatgggagtgcagataatttctctgatgtaacaatttcagttcttttggatataaattttagtgatctcttgcattgcatggtgacaacagttgattgatagtgtattatatatttcagaattccaaaaatggatttttaatgttctcaccacaaaaaaatgatgagttagtggagttagatatgttcattagcttgattcagtctttctataacatagatcagagcattacattgtataccacaagtacacacaattgttatttgccagttaaacaaaaaagagttaagtataaatatttgagtcttgaaaagttatttagctaaaaccagcattcctcaatattttaaagttctggggaattgaaggtcgtatgaatagcaaattatgggaatatctaaacagaagtacaataatggtggattaatatcacttttgctaaaaggctagttactccctttctacacctgccacaggcaaacgttgttccgatgatgcactcctggtatgagtttggagccagagagaagacccaggaccaaaatgtggttagatctttgttgttcttctgttagatccaaaggggtagtcagttgggctgagaaaaggatggggttagaaggccaagatagtagacactttgaggcttatactgagagggggaaatgatggagaacaggagtagatggaatgtgaaggacctttgagtgaggccttttgcccctttcaaccgaagaaaagtatcctttggatccttctgaaatttcaccaatttgtttcagttaaaagcattttcttttaaaacgtaaatataatctgccagcgttatactgaatttagttttatgcattgtatgcgttactttcatatcttggagtccggggtcaccataggaacaaggagcaatgaaactgttgtaacagtagcacccttgattctttctgtggctgcagtttaatattttgttttagtgggttttaatgggcttatgtaaaagttttaaaagatatttctatagcttcaaactttttaaaattttatttaaagtaagtgtgtatatttaaggtaacaacatgatgttaaacatatacatagtaaactggttactatggtgaaacaaattaacatatccctcatctcacataattacccatccccctgctcctgtaagagcagctgtaatttactcatttaacgaaaactttgaatacaatgcactgttaacaaaattgttcagaaatcactaacatattgtgaattctcttaacctgattgcttccctaatactaggagaagtcttttttggctgagggaatggtagttttattggtgatgagaggactggaccatacagaatggaaactttttaaatataaattaaaaagtaacatttctaagttaacagcttatagtttgtgaagcgctttcacaggcaatatataagtttaatgcttaaaatcacctgatatgtaatatccctgttttatggataagagtaagagaggttcgtataaccgcctgacgggttatctgcccaccacacaaacaaaatcaattcacggagaccatggcactgcagtaaagagtttaatgacgcgaggccactcacgccacgcaggaggtggagttattactcaaatcagtctctttgcaggcttgtagtttaggagtttttctttttctttttctttttcattctttctttctttttttttttttttttttttgagatggtgtctagctctgttgcccaggctggagtacagtggcgcaatctcgactcactgcagcctctgcctctgaggctcaagctgttctccttcctcagcctcccaagtagctggaagcacacgcccccaggcctggctaatttttgtgttttagtagagatggagtttcatcatgttgaccaggctggtcttgaactcctgacctctgccttggcctcccaaggtactaggattacaggtgtgagccactgcgcctggcagcttaggggtttttcaaaggtagtttggaggaaggggtgggggcagtaaggcaatgggtgcttgctgctgattggttggggaatgcagtcataggggtgtgggaaaatcccccttaattgctgaatcgcttctgggtggggccacaggagggcttgttggagggcttgttgggtccaggtggagccattgtcagtgtcagacatgcgagaaacctcaaaagatatctaaaaaggccaatcttaagttcagcaatagtgatgttatctgcaggagtaattaaggaagttgtctatattatgacctccagagtaatggctggcagtcctttatgtcaacaccttagcagaattcaggctcctttcctcctcctagcctggtggtctctttttaactttacaaaggcagttgagttttggggaagggctattatgtaaaccataaactaaatgtctcccaaagtcagcttgtctcaagcccaggaataattaatatcagcatgaaggttaaaggcaaagaagagggaggttgactagatcagatcctccccgactctttcactgatagaatttttgcaaaggcagtgatacagtttggctctgtgtcctcacccaaatctcacctcgaattgtaatccctactggtcgagggaaggacctgttaggaagtgattggatcatggcggtggtttccctcatgctgttctcacaagatctgatggtttttaaagtggcagtttcctctgcactcactctctctcctactgccttgtgaaggtgcctgcttcccctttgccttctgccatgattgtaggtttcctggggcctccccagccatgcagaactgtgagtcaatttaaaccgcttttgtttataaattacccagtctcaggtagtatctttatagcagtgtgaaaacgaactgatgcagtttcattggtgactttcctagagtcacatgatagatagaaaagttggaattttaggctgggtgcagtggctcacgcctgtaatcccagcactttgggaggctgaggcaggcagatcacctgaggtcaggagtttgagaccagcctgaccaacatggagaaaccccatctactaaaaatacaaaattagccgggcatggtggtgcatgcctgtaatcccagctatttgggaggctgaggcaggagaattgcttgaacctgggaggtggaggttccagtgagccgagatcgcgccattgcactccagcctgggtaacaagagtgaaactctatctcaagaaaaataaataaataaataaataataagaaaagttggagttttaagtccagactactaattataaatccagttctttctccacactacctgtaacaataccagggaggcagtgtgggattgtaggcctggaaacacatggtattgacagctttgggcagccagaggtatgtacagtataacaatgtcattcagtttttactaagcacttactgtatgctaaagtcctcaagcattgaggataagataaacaagacttggttctagttcttaagaaacttagaaagggagaggcaagtatcatctacttttttattgaaatacaattcatataccatgagatccactctaaaaatgtacagttcagtggcttttaatgcattcacaagattgtacaaccattaccactaattcaagaatattttcatcacctcaaaagaaatggtactcattagcagtcactcatatccttctcttccagcccctggaaaccactaatctactttgtctctgtggacattccacatgtgaatggaattatatttggcctttgatgtctggcttcttttacttagcataatgttttccaggtctatccatgttttagcatgtattaggatttcattttttatggctgaataatatttcattgtatacatatatcatttgttcatcattgaacatttgcttttcttctctggctgtcaggaataatgctgctgtgagctttcatttacaagttcatacaagtatgaacgtagtgtaccaggctgttgttgcattgctgtttataaagaaaagaggtttaattgtgtaactgttctgcaggtttacaggaagcatattcaggcacatttatggattatttttaactctttttctactgaatttggctagattaagaattcacatggagaaaacctagcattagcattagtttaagctggtgaaatagccaagacagctaagtttaagactcaaatgtagaggtgaagtctcaattttcttttgcctaatcaagaaaaacttcctcaaggactgaattatactttagtgtgtagatatgagatatatttgttggtcaagatagagtatggtatatgcaatggcttgagggagtgagaaggcacaactggagtaatacagaagtgagttgttatacaaaatagaatagatgaggaattatttgtatagcttttgattatactaagtcagatgtattaatggtgatatagttaggtaactagaagaaatatattaaaatgaagaattttagcatttacattttatttatgcaagaaggtaataggagatagtaaatggaaaacagggaatgttttgtagtatatttagtgtttcacttatggtacagtacatgtatctcattaatcagttttagaacatttctgtttgttggtaaaatgtaatattttcctgataatcagtagaacagcacctaaatatggaatccttttattaggttcaaggccaagtcttcaatactgcataacactagaacatttctggaaacttggatcactattaatgcacttgtatattttctttaacaaatatctgagaacttaccatgtattaagaccctaagtactgattatagaaggatcaaacggaaatggtccttgacctcaaggagtttcttatataatagggagacagttttcttttgttcttttttattgctgttgtgctttttttttttttttttttagatggagtctttgttgctcaggctggagtgtagtggtgcagtcttggctcattgcagcctctgcctcctgggctcaagcaattcttatgcctcagcctccagagtagctgggactatgggcgtgcaccaccccgcccggctaattttttggatttttagtagagacagggtttcaccatgttggccaggctggtctcgaactcctgaccacaggtgacctgcccacctcagcctcccaaagtgctgggattacaggcgtgagccactgcacctggccgggtgacagttttctaaacagggtcaaaacagtgagcttattggtacaaatggatgtgtatagatgacagtgaaagaatagaggcagaagatcctacatctgcctgtggaagtcagagaataaactttatatgagataatcttaaatttggacttgaaagataagtaggcaagtgttagctagtcaaggttagttagaaggcagatattccagataggaattatgtatgctgaagcaacaaagggcatgaaaggagtgtgagattcaaagcagttaggtatactgtagatgataatttcaaatcggaggtcagattttgtgatttttcttttttatgctgactttgtcactgttttattttaagctctcttaaacctgggtgcagtggctctgcctgtagtcccagcactttgaggaggccaagataggaagagcacttgaggccaggagttcgagactagcttgggcaacatagcaagacccagtctctacaaaaacaattaaaaatgagccgggcatcttggcatggacctgtattcctggctgcttgggaagctgaggcaggaggatccctttagcccaggggatcaaggttgcagtgagccgtgatcgtgccactgcactccagcctgggcaacagagtgagaccctgtctcaaaaaaaaaaaaaaaaaaaaaaatagaatctacctcatggatatgttggtaagattaagtttggtgcctgacatataagtatttaataaatgttagttgttatgattatttttctcttccttttctttttcaccagccctcattattaaaaagtaagctttgggaggaaggaccactattacgcttttgtattatgcttaataggaaaattataagcattcatccaagtgtgttgagtactttgtacttgtcttgaggaacagtagggataagagagacctgctgtcatagagtttacaggccaggagaatgcagacatttatagattttttaaaaccctacctataataaattgtatagcattactcaaaggggaaattgtaaggcatcaacctaaggtgagtatataccaggagaacccaataaaacttagtggattgttaaagcctctttgaaacctggaagcggggtaagagttagtagggagatgtcatcagtaaattttattaggaaaaagggcagaatttcaaatcccacaaggtctgaaggaactgggcacttttgaagaacagaaaaaaggccagtgaagaacaggaaagagagaagggcctagttctgtagaggaaaatggaaactagatcaggtagggcctttgtaagctgcataaaggattttggattttatcctaaactcagtgagaaagcatttttgaagggttttggtggggtaggatcagtgtacatgacctatcagatttgcctactttttaaaggcttttatgagccatataaaaccattgtagcttttaaaaaagaaaaaggaaaaaaacaaaaatagttgtctaccccattctttcacctgactaaatcccagcactataaccaattggtgtacatcctttcagatttttccctaggaatatgcaaacacgaatttaaaaacgtgtgtgtgtgtgtgtgtgtgtgtgtgtgtgtgtgtgtgtgtgcctgtgatttattttggtttattttgttttgttttgagacagggtctcactcttttgccgaggctggagtgcagtggtgctcaagggatccttctgtcccagtatccccagtaactgggactacgggcacatgctaccatgcctggctaatttttaaatttttcttttgtagagatggggtcttgctactaatagttgactagactggttttgaactcctagtctcaagtgatcctcttaccttggtatccgaaagtgttgtgattacagatatgagccaacctggccatcctgtaatttttttaagtaacagaaaatgagattataccacatgtacacacctagtgctataaatactgtgttgcaagttttaccttttttttttttttttttttttttacagttttgcttttggactttttcttttcagaaaaagtctttttcttttcttttctttttttttttttttgagatggagtttcattcttgttgcccaggctgatgtgcaatagcacgatcttgactcaccttaacctctgcctcccaggttcaaatgattctcctgtctcaacctctcgagtagctgggattacaggcatgcaccaccatgcacagctaattttgtatttttaatagagacggggtttcttcatgttggtcaggctggtctccaactcccaacctcaggtgatctgctcacctcggcctcctaaagtgctgggattacaggcgtgagccactgcgcccagctacttttggactttttcatgtcagttcttagagctttcttgtgttttaatccatatggtattccatttcattggatgtttttttagccctctgttggtgaacttttggtttatctctcacatgttactattaaaaacaaagctgcatttgtgaaaagatgttaagatcattagttattaggaaaatgcaagttaaaaccacagtgagatgtaccacgacatacttattaggatggctaaaattaaatagacttaacattaaccatagcaagtattggtgagaatgtggaggaactagaaccttcaaacactgttgggattgtaaaatggtacaatcactttgaaaaaagttcagcggtttctttaaaagttaaacgtgtatctgtcataatgattcagccattctgcttttatttgccaaaagaaaacaggaaatatttctatacaaagattcgtactcaaatgtttatagcagctttgtttgtaataagacaaaaactggaaacaacccaaatatccacctgcaaataaatggataaacaaattgtgtgttcatataatagaatagtaactaacagtgaaaaggaatgaactggatccaacagcaaggataaatctcagttttaccaagtgaaaaaaatagatgaaaaaagcgtacagtatataattcaaattatataaaactctggaaaaaaaaactaaagctgaaggaagcagatgagtggttggttgaggacaggttgtttgagagagggattgattaccatggggcatgaggaatcttgggggtgatagatatgatctgttcactattcttgatttgggtttcccagttgtagactatgtgaaaatgtgttaaactttcacatcaggtactacactttgaatatatttagtttattgtacatcatttataccttaatgtcatttgtaaaaagctgcattgaggcacaatgactgtatagttttaaacacatatttctgtaagcgaagttggtagaagtgtaattactgggccaaaagtaattacacatttaaatttcacataggtattggcaaattgctctacaaaaaatattgtgccagcttatatatttgaaaatgcccatttttgcattgtcttcccaatactaggtaaattaatcattcttccatcttttccagtgatggattaaaatgacattattgttaactttattttcatttctttgattggtgaaattggttttcttatgttcgttgattatttttatttcttctgtaaattatctttgtcttttgtgaaatatctttgctcattttcctattggactgtgtttttacttttaaatcatgaaaattatttatataataattatatttccatgtacttattcagggatgctcaaaaaacattgctttaatgaataaatgaattaatgtctttccagttagacttctaactttatttatggtgactatccatgtctagtgaaacccacaggtgaatgcttcagttagcacctatctgttggaggttataatgacatcagggatgtcctttaatgtatttcctgtttgcctcttcctgacctgtccatcctctacccttagagttatctttctagcaaaagatacaaattgcaggtgaggagtataaaaaggagtggaaataggtaacatgggattttcatgtcagttttgaatcatcttcccccttctgtttttaggtgggatgcatccccattttcatctctggcccatattaggtactcccccctcataacaaatcttcctgttgacttgagttgcagctagggattcacctgtagtcacagctttgcaagtgcatccttggccaacagctatgaccacagggtaacacaactgctattgtcctttgattatccctccaactaacctactgcctactcctaccttcagcccttcatgtctctggcatgggttttgttttgtttgtaatcccagtactttgggagactaaggtgtgcagattgcttgagctcaggagttggagaccaatctgggcaatgtagcaaaatcccatctctataaaaaaaaaacacaaaaattagccaggcgttgtggcgcatgcctgtagtcctagctattcaggaggctgaaatggagggcatggcttgagcctgggaggtggaggttgcagtgagtcaagatgatgccactgctcttcagtctggacagcagagccagaccctgtctcaaaaataaataaaagaagaatatgaccatttcttttatgaaatagtataagatttaaggtaatattcatacttaaataattttttttactctttcttacacattttgtcatttaatcatcggagttctgcaatataggtggcatgttttaaggataggaaactgacgttcaggttgagaaccagcccagaatcatagttatgggtcttctggctttatcgtactgcctctaagtaagggaagggctcatatgtactgttaactgtgcccttttttttttgtagtaaggggccttgtgtgtcaagctaagggctttctgtgggctataagaatttttcagagtttcagagctgggtactaacataattacatttctatttaagtgaatgattgtggacactgaaatggagggatactggggacaagaatactgataaataggtcctgcagcaattttgagaaacagcagaagtgtcagagcatgtcagctattttcataatagaacatataggatttgttttgctctgagcacctagttgtttgctgaataatacagttttatctaaataaactttatactgtgtgggccctcagtggaccctaaggaagcaataataaggctcagcttgatattggataatctgttagtttattaataaactgagtataagcagtgacataaaattaataacttctctgctttaatcaaagcaaatttgtctttatcttctttctcttcagttggaagatgctggctcaagtagtttagataatctactaagtagatacatctcaggcagtcacctacccccacagcctacaagcaccatgaatccttctccaggtccctctgccctttctccgggatcatcaggtaaagcaaacgggtattaccttattttttaacaccttaaaaaaacagtgtcagtatctgtcttagtcagaattctccagaaaaacagaataagtaggaggtctacttgaagagagaaagggagattgagagagatttattttaaggaattggctcatgtgattgtgggtgttggcagggaggtgaggcaggctggagacccaggtaagagtattgttacagtcttgagacaaaatttcttctttggggcatgaggaggtaggggagagaacagggctccgtcttctcttctctcttaaaagggctttacctgattatatgaggcccacttgcattatggaatataatctacttttctcaaagtcaacttgttgaaatgttaattaatcccatctaaaaaaataccttcacagtaccatctatactgatgtttggccaaactgctgggtgtcatatcctagccaagttgacacaataacatatttttttcttgattgttctttgtaattatttttgttcaaatactattggtactctttcagtaactgaagccatattaatatatatctgtagtctacactatttggaactccaaattactcaacccttagtatattcacagtctttcatgggtttaatcttatattttacaatacagagtcagttgaagagttctttggttccaagtcaactttaaaacacttagtaaaataatgaaacattgaaaaattatttaaaaagtaagagctaaagaagggcaggttaattttcaaactgtaattttaaaataaacattttgctgaaaactattaaaatagccatgatatgtagctctcttccaaaatcccagcggttttattaaccctattactcagtgattcaattgggactcttgaatacatgattgaagcaactccaaacaggttaacagtctagaagtgttattgaatgtatttttctaacgtaaattaaatgttatttttttcttactgaaacacaccacctacttctttctagaggaagaacaattcacatgtaaatatggattttccatgagatgcaacattaacatatttttaaatcacataatttttaaggtttaataagaattatttcaggacttctgaaaataattaatgggaacctaagtagaatattttatcaaataacttgttgagggatggcagataacgttttcttggtctgttttgttgactggatagtggtgccctgaggaggattctgaggtgatgtctggacacagctgagagaaactggttgatgtctgctaatggttacacatgcgtccctgactttgtgactaggtctgatttccaataattttttagctgggttataataatcttgagttctgtgaccggtaggtagaattccaaatattcttatatgcattgatattcattttgacttactactttttaggtttatccaattctcacacacctgtgagacccccaagtacttctagtactggcagtcgaggcaggtgagtatattgataattatttttttcctttttgttaagaaaaatagcaaatatgtataataaaagtagaatattacagtgaacccctttatacttaacactcagctttaacagtgatcaaataatggccaatcttgtttcttctatacttctgccaattcctttctggtctgaattattttgaaacaaatctcagtcatttcactcgtgactgtttcagtatatatcacttaatgaaaggaactttaaaaatttataaccacagaaccatgatcacacctaaaaaaatttaacaactcattctttaatatcagtagagatccagttaatgtttagtgttcccaatttttgcaacaaatgcctttgaaaaaaaaaccagatgatttctttgaatcagatgcaaataagctctatacattgccatcagtttatttgtttacatcactatcagttaatttgttgtaaaaatgtagtttctcctacagtgttttcccgatttctccatcttgtcatttaagtacattgcctcctgtttttctgtctattttggtatttaggtcaagagggttgatcagatttaggtttgatttgggggaagggagagcaagaagacttggtagtgtagtggtggcatatacttcctttggggcgaattatgcctggttgggggtttttgtgatggcaaccgttaataatcattgtttagctctattatttttctgctggttgaaatattacattttaattattgtatcattctttatttctttagaatatttctgtaaagagaagctttctgtcatcaactattgggttataggaaagataggataaattctttctgtttatttccctgcttttgtggtaatgaattgatttccaacaccctccaacagtgacagttttattgttattacctttatggactgagatatttaaacatactttatatattttaatccattatatatgttacgtctgtatgtatgtatattgaacactgaacattattccatctttgtcctgtcaaagctttctcaggcttgctccttagtccttttgctataatcacagcagtcttttttaagcttccatgtttcctgtgaaacagcatttcgggttcattttgtacatttcatgcttcagacctggaatcagccactttcccaggaagttctggtagtgttagcaggaaagcaggaaaatagtgtttgaggataatattctagtactaatagcactcattgctactgaattgttcattgtttcttaggccttttcagtggacagagctaagaaataggagtgtgtgtgtgtgcgtgtgtgtgtgtgaagaaagtgcttcaaaccataaaatgtgtttttagggtcttctgaaagttgctgcataattttaaagagttttaagctaggctttataccacattccccttaactacattatgaggtatccttatcttctgtaaagttaattgtctattgtcttcactttagtgaacattacttttcatataattgtttttatttataccatatagtcaaacgtatgtgatctttatttgttgtttcttattagctgtgggtcatcaggaagaactgctgagaagacaagtcttagtttcaaatctgatcaggtgaaggtcaagcaagaacctgggactgaagatgaaatatgtagcttttcaggaggtgtaaaacaagaaaaaacagaggatggcaggaggagtgcttgcatggtaagctcccactggagtctgacagggacttaaggacatcacttcattgattctttcagctctgagtatattaagactaagtagtgggtctagaaacatttatttttgaaatttcatgcctggcacaagccagatatctctttttctaactcaacttttttgtctaagagtcagctgtaattaatcagaaaagacttaattgtattaagtactcatttgaaattatctttgaatttgtatttagtcaatattcttcccatgatgctaaatcagattgtatcttgtcctgaaattattatttcagtagtcacattgaatctcaggccacaaaagatctttgggattctcctggacctgtgagctcagcattaagattgctgacatgaaagaaatttattgatcagagttttgtgataggaagtttgtcttttggcttacgtattactaatcattctggagttccttgagtggaacatttataaaatttctaatacagaatgaaggaaggccaagcccctcttggtttaaatattttgatttttgttttctctttctgaccgggcttctttttccttttttatatggttggcacatgggaattcatctcaaggtattggtatatttaacacagtatatatagattcagagagcaagagattcagccttggttttggagtattgttacgtcttcatccagaacttggtttagaaagtacccccataaaaaaaatgggtgccaaggttggtgaacaatttcttttatgttgttgcagccttcctacaatatagtagaatgataggtgagcagaagaatattatagaatgcttctaaaatgctatgcaaaagattctgggtgtgaaaaggggtgtgccataattagctctctcaaggaaaagtataaccctatgctcacttcccaatcaatagcttaacagtttaattaatttacttattatttgagtgagacattatcagaggagcagaccccttaaaatcatatgttagcgtgcctgaataattttggggttattgtcatttctttatggcactattgtgatctataaaataaatttgttacgtcagtatatctatatgcatattcacataactgttaaatacacatatggcatacaataaagattaaatgattcttcaagaatttgtcatcgttttgttttagttgagcagtcctgagagtagcttgacaccacctctctcaaccaacctgcatctagaaagtgaattggatgcattggcaagcctggaaaaccatgtgaaaattgaacctgcagatatgaatgaaagctgcaaacagtcagggctcagcagccttgttaatggaaagtccccaattcgaagcctcatgcacaggtcggcaaggattggaggagatggcaacaataaagatgatgacccaaatgaagactggtgtgctgtctgccaaaacggaggagatctcttgtgctgcgaaaaatgtccaaaggtctttcatctaacttgtcatgttccaacactacttagctttccaaggtaccagtgaaataattgatttttggtgttgattttcataagctaaaaataaataacagaagaatgttcagggcagatggccttctaaccagtgcacagtatttctataaaacagggagcctgttattcttttggtattagcttccagagaaactaacaataaaatatctaagatctaagtagtacattaatgttaaagagtagatttcatctcctggcctttagtttatattcagtataaggaaaatagataaaactctaaattaatagggggctaaggttacaaaacctgcagtctggttctaattctgtagtaagcttgagcaattcactaattatcagggatcagtttttgcatctacaagtggtaggttttggtttagcagagctgtagttcttcccttccatttattattttatgttcatgcaacctcttgtctcttgatttcagagaccataaaatagtagagtcatacttgtttttttcagtcttctccttcctctcttgtcccccaatttctttttggtgaaagtaagtcagtattcttggggtaaacccagcttttttcttgctataaattgaaaaaaaaaaaaaaaaaagatatatcttctcaaattcctgagaagcagtaactttaattgaataatagtgccctctttgaaagtgttaaccttttggattagaaaactagtagatatttaaacagtgccagaatatttttctgaagaattgtaatttcttacctaagtctttggagatagagttatttgctagagatgtaataagggccttctttttctttactcttatttagaaaagaaaagcattggcactttgatcttgaaattaagaattttcttttctttgggtagtaatatttactggaatgtcagaattttgccactgaatgccttctttcaatagcaaatgctttgaaagggttgtaaaatgttggcgtaaattagccaggtgtggtagctcacacctgtaatcccagcactttgggaggctgaggcaggcggagcacttgaggtcaggagtttgagaccagcctggccaacatggcaaaaccccatctctactaaaaatacaaaaaaaaaaagaacttagccaggcatggtggcacacaccttgtagtcccagttactcggagagctgagccaggagaattgcttgaacctgggaagcagaggttgccatgagccgagattgtaccactgcactctagcctgggtgacagagcaggactccgtctctaaaaaagaaaaacaaatagattggttagtacaatccctagatttaggatctatgtatatatctctctatatatctccatgtatctgtttatatagagagagggagtgaatcattttagaattcatagtttgataagaaatcctgataaaaacaaagtatatacttggcagggttaaaagataggaggtagccgggcatagtggcttacacctgtaatcccagcactttgggaggccaaggcaggtggatcacttgaggctaggagtttgagaccagcctggccaccatggtgaaaaaacccaatctctactaaaaatacaaaaattggccaggcatggtggcgggtgcctgtgatctcagcactttgggaggccaaggtaggcagatcacctgaggtcaggagttgcctggtcaacatggtgaaaccccatacaaatattacaaaaattagctgggcatggtagcaggcccctgtgatcccagctacgtaggaggctgaggcatgagaattgcttgaacccgggaggcagaggttggagtgagccaggatcgtgccactgtgtactccagcctggaggacccagtgaaactgtgtctcaaaaaaaatagaaaaatctgccggtcatgatggtgcacgcctgtaatcccagctcctagggaggctgaggtacaagaatcgcttgaacccgagaggcggaggttgcagtgaaccaagattatgccactgccctccagcctgggcaagggggagattctgtctccaaaaaaaaggaggtatatatacatgtgcttgtgcctgcaggtatgtgtttgtgtgttctaggttttgaccacgaaaaaagaactgatttacttgtggcattttaatacatgccaaaacagtacaagatacctgagaaactctgcaacctgtgctcttcttcttcataaataactgagtccacataatggtgatactgggatctgagagaattggtcttaggccttatgctgcaagtactgctcatcactactaagagacccccttttaatgcggaggtgccatttttataatgcattccagaaagtaatcaattgatgcgtgactaggaaaatttagaggagtttttaatcacatgacttcacctgacgagatttcacaactataaaacctcccttttttcaaaaaattattaagaaaataaaccaggccccagtccagggaagtagcttctctagagcaggctttcttataattacgtggactaattgcctatttccctgtctagtggggactggatatgcacattttgtagagatattggaaagccagaagttgaatatgattgtgataatttgcaacatagtaagaaggggaaaactgcgcaggggttaagccccgtggaccaaagggtaagtgtcaaataagttgatttgtcactgggattcagtagttgtctgcctatatatacacctttttttttcctgtgtagcatacacaaaacctgataacatttaatttttaatcctgtcatctgatggtatattgatgatttctgaagtctttttttcctctaaccctgaactacagacccttctatccagattcctcaaacttaacatgtcccaactaaaatcttaatttctaatcctctccctccaagcacaaaaccaagcaaataacgacataaaaaactgtattcctcccccagtattccccttaattgaatgataccaccattcatttctgttgctcaggttagaaacctattagaaatgaaataataataactataatatgattttcttaccttacatcataatttctcatctggactattgtagtgatctcttaactgctctccccgcttctgctcttgacctttatagtttgttttctgtattaaacagtgttctttttaaaaaagtaaacaagtctatcatttccttgcttaaaatcctctaatagcttctcatcatattaaaaatggaaactctctccttactttactcagatttttaccaatctggcctgtagtctgattgccaaagacagactcttttgcattgtcgtgtggtcattagagttaagtttggctctactctggtgtatatactggtaaaaaccctcatccactatctgtgaagacaagatacgtgtttagggtatacaaacttgtattaaaagaagtttagataaatagaagactgtgaatgtaaaatgcatttcagtttactcatgattgggtaaaaaaatatttttggagttagactgagaaggccattttcattttgaacctgactggaatcatttgaagaaaggggatgataactttcaacatttgtcttgcctgtctaaggaattaccatgaggagcaacagtgataatttatttacttatttatttattaccaagtaatttataaatttttgcacaaagtgttagatgttgcttttgtgactcccttccataaattaccttagttatcttccattcttacttaaagtagaacaaaagatagtctgaaaacaaaatgagaagcaagggaattttctttgggtgtttatgtttagttgagtatctagtaaacagggggcttgtgttcagtttgttgtaatcaaactttgttgtgatatagttctcattctcgagaatgttttattaggagaaaaatatttcatgtgctttcctttccttgtttgggccagaaatgtgaacgtcttctgctttacctctattgccatgaattaagtattgaattccaggagcctgttcctgcttcggtgagttgcctaccttagtagctcggtggggaagtctcataatacttaagagtatgggctctggcggccgggcgcggtggctcacgcctgtaatcccagcactttgggaggccgaggcaggcggatcacgaggtcaggaaatagagaccacggtgaaaccccgtgtctactaaaaatacaaaaaactagccgggcacggtggcgggcacctgtagtcccagctactccggaggctgaggcaggagaatggcatgaacccgggaggcggagcttgcagtgagccgagatcgcgccactgcactccagcctgggcgacagagcgagactccgtctcaaaaaaaaaaagaaaaaaaaaaaaaagagtatggccttagactaagttgtattacacctcagccttctggaataagctcttcaacctctctaagactcaagttttctgacacgattttttacctcattgggttgttctgaggattatataaaataacctatgtaaaatatttagcatagtctatagtcattgagttttgtaaggaataaaggctctaaaatgctgcaataaaaggaagattagaggtgtttggtgcctaataagtggggtaagaatattctacacacattttattgctagccatcagttgttgaatagtacattattacataccaggcctgttagagaatattaaatggtagttgacttgtttactgggtagcctgagaaatgaattttaaatcacaaaaggtatagacagaaggaagatgttttgtacaagcagtaatcatctgtttctggaaaatttgtctcatctttaagtgcagggattttaaagtagaaaatgactttcaaatgttttctttttatggactattaaagtagcttcttggccgggcatggtggctcatgcctgtaatcccatcattttgggaggcctggcaggcagatcacttgagttcaggagttcaagaccagcctggccaacatggtgaaaccccctctctactgaaaatataaaaattagccgggcgtggtagtgcatgcctgtaatcccaactgctagggaggctgaggcaggataattgccaggggatggaggtggcaatgagccacagttggcgccactgcaccactgcactccagcctgggcgacagagcaagactccatctcaaaaatcaattagtcaatcagtcaataaaatagcttctctaactttacttttatcccaagggtagaaatttttcgccagagttggggtcagaattccctagcgtgaacactaaatggttaataaagttagtaaatttttcttatgttcttagtcttacttcctctgttactaagtcaagacttcgtgatgtaaatgatattccctgttatgttttccaaaagacatcatattctaattgtaacattaatatattttgtaaatttttttctttaaaaaaaaaagaaaaactcctaaggagtcataaaattctggtaagtcaaatgttgcctcaaggctactggttggttacccttgctaattgctttctttccaaatcttattattaaaagtaggactttggggacttggactaaccatgaagattggcacatatgccacataagatttggttttcatgaagatgtaaagtacatacgtctatactcaaaatttgcaagcagctggctctataataatttttttccctaaaattaatatgctatgcattttcaaattaaacagtttggcatttttggagaattcttatttgccattatgtgcttattttagataccaaactactataaaattataaagaaaccaatggatttatccaccgtgaaaaagaagcttcagaaaaaacattcccaacactaccaaatcccggatgactttgtggccgatgtccgtttgatcttcaagaactgtgaaaggtttaatgaagtatgttaacttccaacctatagagtcttgatttgttagtttttgtttgtttccttgttttatttttctgctgactttaattttattaaaatttttttttctgctaaagtcctgtcaaaagtaacatctgattgtattaacagctccagtgaagaaaatttattgtgtataatttggagtatatacttaaatataataaattaagaatattatcaaatatccttttctaaatgagttgaggattggcataagtatggaaagtactgtcagtagttacgtatattttgtggaatatgattataaacagcttacgttttgggtactattaggaaagttatctgtacccatgtccttgcattttattattgacaacatgaatgtagaaccttaaaataacaaactaatctctggtgacccatcttgaatagtagcccagagtatataatactaagttttcttatttcagcagtgtgactttgattaattttggttatgttttttggtttggggagttttttgttttttgttttgttttgttttgtttttttttttttttttgagggtaagtttgagttagccatgccttgagaagaaatgtattatatacctgtttcagggaaattgtttttattagggataaaatcgattctattattgttatggaagagtttcattgtaggagaagaaaatggaatttaatgagaatccacaaaatcttttaaaagattaatactaaagtctctttattgctggtgtaatttgggtgccatatgattattactaaaataaatcacattggatcctgtaacgtattcctatagctgcctctggaagcatccagatggcattttaaaatcaaaaacaaaacaaaatcctcataaggtgaaaattctaagtcacctttatagcagtatggcacagagtatattagtaaaatctcactagtttgaagttatatttagtcccaaattctgtcttatttttcagtgcagttaaattattttcaaataaatatgctttcatgaactatagttgataagaagacccatgtttcctgcctcagtaataaatagtttatgattaacatattgctatacagatagaatttttattaagtggtttgttgaaagtttgtcagttttttaaagcaacgtttcttgtataatatgcttcacaaatatttttctcttggatagattgatgtgttcagaccaattcctattcagattgaccttgataattcaaaataagacaattactgaggtttcacagtagctttagtaacagggctttgtaaagaaaatggttccatgttctgtagaattttagaaaagcactttatctggttatagcaatttgttctccctagtatggctgacttttcgtcgccaatcctatgcagtctcataactttagaaaggattataatttcccttttttttttttgactctggtatcctttttagatgatgaaagttgttcaagtttatgcagacacacaagagattaatttgaaggtaagcttttcagaccatgcaaacttggtgaaggaatatgcattaccaataggtgaatattcctatcttttgcttgcaggctgattcagaagtagctcaggcagggaaagcagttgcattgtactttgaagataaactcacagagatctactcagacaggaccttcgcacctttgccagagtttgagcaggaagaggatgatggtgaggtaactgaggactctgatgaagactttatacagccccgcagaaaacgcctaaagtcagatgagagaccagtacatataaagtaaaatgacatggatttaaatcaattgtttaaaaaaaaaaaaacgaaaaaaaaaaaaaaaacacaaaaaacccagaaaacttttaagtgttgctggaatatcctgcctacagtgggcacctccttgaagaagctgatagcttttacacagtattagattgaaataatggacagaaacacattcttgtcaagaaagggggagagaagtctgtttgcaagtttcaaagcaaaaagcaaaagtgaaatgatttgaggatttctgttctaatggagatgattctctgattgttagaaatggcaaatattgatgattgtgtgctattgattggtgcaggatacttggtatacgagtaaatacttgagactcgtgtcacttgataaattttctttttggactaggtcgcacagttattaaaacaacttttaaccctcccccttcacacacatacatatcaggttgttttctagttaaaaacccaagtagctcagattctactttaatgtcagtgcagatttgcattgaatcatgccattatgttttttctcatttttatgctgttgggtcttagtttttaaattgatataaagaactcagcaatggttttattttctactcatacttagggtttaggaaacactaccactagttatcatttaatcaacttcaatggtctactgaaacaaaaatggtaacttttcattagtggattatttagagttatagtagttgtttccagaaaacacttcctcacaattgtacttcccaatcaaatcatgtgatcatacagttattcccatgaaaggcagaatgtttgtttcaaaattaatctagttttctgtacatttaaatttgagaaggtgacaactggctcttttccagtcttccttcatgtcagttttctgatagaccactattggcaaacagtatctgtcaactaccaaatgtgtaaaattttctgtatttcactttgtcttatttgtaaatagtgaactaaaacttttggcagatcagcaacatttgctgagcctgttttttaagctaatgtgtattcttactaatgttcctatcaagaatggatttgtaatatatgctgtctatttctaatgttcacattcatattttgaggttctatcttattttaatagagaacagacttctcaaaaaatcttcagaagcagcttattattgaaatatcgaaatattgaaataaacccggtggggttagattactcatctgtccaccaagtgggacatttgcatggactgggggcttaaaggacttagaagagacctgtaagtaaatcctgaaaatgagccaatccccacttgaatggttactggagtaaacccacctttaccaccccaattacagcacccgaggccgataaaccaacttggctctggttcatttttcttttcttcatttgtgatgctcagattcaaaatgtgtgttctacactgttacaggcttctcttttgtttgattaaagattttagtcctacttttgtatggacacattagaatattcagagaccaaaatagaagaatttgctgttagatatttttcagaagtcagcagatttgtggcaaatcatttatttgcctttttaaaaattcatttaagcagttcagagagtagactactcagaaaattatttcacgtaattgtctaagaggtcaatattttttaatgcatattgaatcaaataaagtgctctaaagaaattattatacaaattcctttgggttgtttttcttttcttaacaaggggtgggggtaaacaggaatatgattcaggctttctggttgtgtatttaaagagtattgattttattattactattgatttactttattcctggcttccttttcacttttctttcaatttttaaaaaataatttaagccgttgaaaatataccaaactgttgaaacattttactcaaattttaaattcctaaaaatgttttttaataagagggagaaaattatttaaaaatacttatgcctatgccaatttccctcttttttcacaaaatccatgatttcagtttgtaagtagacatatatctaagggcacatttttggaaagtgaggaatagcagcagtataacttcattttgtcaggcctttgagttctaatattttgtattgctcttcaaatggatccttttaaaaaaattgtagataatgagtcataaatagattctgccaactgaggggagaaacattttaagtaaatatttttcagtatttggggccttaaaaaataattgtgtttccttaaaattacatgttagatagagtttttaggtttttttggttttaagattggttaaagcaatttaaaagccacttttttgtcaacatttaatagcctccacttctgttaagataatgtatactgctgaggaattactattaatagctatcaacataccaccattaaattaaggtattcactttagattttttattaaagcttttttcttgcacactgatcgttgtgtttctaagctgattttttcagctctaatatacctatggttaaaaagtataaaaacttaaattgatatttagatatatgttttcctattagtttatgttttaaaaagacaaaattgtatctgtcagtccctgaaggcagtttgtttttatactctctcacatttgtatttgttttttaaatggcagtattttagaagatttggagaaaagtccacataataatgttttcttaaaagcttttaaagtttttgctgtacttcaatttacttcttccatcagaaaactaagaacaaagtgttgctcagtctgttccgctgacctaaatttgtgttttcagcacttggctcagccaattcactgagtgaaggaattgctttatgaggcaaagcatgtgaaagttctaaagtatggttagattgtaggtcgtgctctatatggaaacatcaaaccattactacagagaaatgataaggcattggatccactattgaaattattatttttggatcaacaagttggtactttctgacttctgtatcttaacataagggaattttaggtaatgctaagtcagttgtctcattttttgtgataagttttggaatttttagttaattgaaataaataatgcttttaaatagaagtaaaaggtttataagtgtgcaaattgtagatttatcaattacctcagcaggtatcctgccatgtaattattagtgattagtgttaataagataatagattcaggtcttccaactatgcccttggattgtggcctactgtatgttattaaatggtctcttactatccaaaatgggagtagatgctgtggccccgtctcccttggcttttacgtcccatatccacccccattcatgtacaacatgtgaaatataaaaatctcatttcttgtcaaaatcagcactgcttatttgcatactcagcatcggatcagtgagtagttttataaaaaatccacgcacccaactcccttagttaaaacagattcttaattcataccatgaattcttaatttctgtaccatctatgttaatgatctgctgaaggtgactcaagattttcaaggtgtaatacagtttgatcatgtaccggacctggatatttaattttttttccctcacagttaatctcctccttgataaagcaataacactgctttgagtctgttgcctaatagcatgtcagaatcctctcctggatggtgattttataggaaagtttgtatgcatatcacccagtctatcttttaaaaattaagaaatttaaatgtatgctggaagtaatgacactatattgtggcattttattttaaaaattggggaaagttgcatatttttttaaaagtaagtgtttgagtaaaaaaattgaaggtacttttttaaggaaaaaaatttatatgccacagtttacatagacatttcagattcaacacgtactcttgaatataatggtttcttttacttggtcaaaatgcatgtatagcatttctttcatcttagttccttgtgtttgcctatgtggtcctttatatattttttattgtatcgaagaaacaaaactatcttcaaaaataagttaatttggatatatttgtcatatcaaactacaaagtgtacaaagttaagtttagcccttttctagaaagtgatctttaaaattaaaaatgctcctcttttaaattcaccaaatttatgtgtgggaaggcaccaaaatgattttgtaagtgccactgcaatattccctttcaagtgtggcctaaatttcaatcttaaggatggaatgcatgtctgctccttgttctgaaaaatgtaggcatctactacattttaaaacacagtgaaacatatacataagcctataaaaaaagatttgtgcaatttgaaagcctgttaattttttatgtagacatacctacacacgaaagggttaaattcacagccttactagttccttgcttccagtatttcaattggtctcctcccctcattattattattactactagtactattatttttgcacatagttaactgcccttcaatatgattcttaaaaagtgctgtttctgtggtatcgtattctctaaataatcatatttaattttttaaaacaaggttgcagtttctaattgtttcgttcctgtgtttttgctggtgtgtaataaaagcaagttttttcttttcatggttatttaatacattagctgcctgtaaataattcttgttataatgctctggaatgtgttgtagaagttgtattagattagttttaaacccttgtttgaaagccacattgttttggttatttctattaaattagaaaattgaaaaagttttcaaatgaa

SEQ ID NO: 18 - protein, 1110 aa, Homo sapiens
MAENKGGGEAESGGGGSGSAPVTAGAAGPAAQEAEPPLTAVLVEEEEEEGGRAGAEGGAAGPDDGGVAAASSGSAQAASSPAASVGTGVAGGAVSTPAPAPASAPAPGPSAGPPPGPPASLLDTCAVCQQSLQSRREAEPKLLPCLHSFCLRCLPEPERQLSVPIPGGSNGDIQQVGVIRCPVCRQECRQIDLVDNYFVKDTSEAPSSSDEKSEQVCTSCEDNASAVGFCVECGEWLCKTCIEAHQRVKFTKDHLIRKKEDVSESVGASGQRPVFCPVHKQEQLKLFCETCDRLTCRDCQLLEHKEHRYQFLEEAFQNQKGAIENLLAKLLEKKNYVHFAATQVQNRIKEVNETNKRVEQEIKVAIFTLINEINKKGKSLLQQLENVTKERQMKLLQQQNDITGLSRQVKHVMNFTNWAIASGSSTALLYSKRLITFQLRHILKARCDPVPAANGAIRFHCDPTFWAKNVVNLGNLVIESKPAPGYTPNVVVGQVPPGTNHISKTPGQINLAQLRLQHMQQQVYAQKHQQLQQMRMQQPPAPVPTTTTTTQQHPRQAAPQMLQQQPPRLISVQTMQRGNMNCGAFQAHQMRLAQNAARIPGIPRHSGPQYSMMQPHLQRQHSNPGHAGPFPVVSVHNTTINPTSPTTATMANANRGPTSPSVTAIELIPSVTNPENLPSLPDIPPIQLEDAGSSSLDNLLSRYISGSHLPPQPTSTMNPSPGPSALSPGSSGLSNSHTPVRPPSTSSTGSRGSCGSSGRTAEKTSLSFKSDQVKVKQEPGTEDEICSFSGGVKQEKTEDGRRSACMLSSPESSLTPPLSTNLHLESELDALASLENHVKIEPADMNESCKQSGLSSLVNGKSPIRSLMHRSARIGGDGNNKDDDPNEDWCAVCQNGGDLLCCEKCPKVFHLTCHVPTLLSFPSGDWICTFCRDIGKPEVEYDCDNLQHSKKGKTAQGLSPVDQRKCERLLLYLYCHELSIEFQEPVPASIPNYYKIIKKPMDLSTVKKKLQKKHSQHYQIPDDFVADVRLIFKNCERFNEADSEVAQAGKAVALYFEDKLTEIYSDRTFAPLPEFEQEEDDGEVTEDSDEDFIQPRRKRLKSDERPVHIK

SEQ ID NO: 19 - DNA, 48383 bp, Homo sapiens
  CDS (304)..(539)
  CDS (6203)..(6274)
  CDS (6483)..(6557)
  CDS (29742)..(29873)
  CDS (30399)..(30542)
  CDS (31576)..(31719)
  CDS (32066)..(32209)
  CDS (32606)..(32749)
  CDS (33648)..(33728)
  CDS (34636)..(34707)
  CDS (36947)..(37018)
  CDS (37506)..(37669)
  CDS (39637)..(39957)
  CDS (41433)..(41714)
  CDS (42686)..(43138)
  CDS (43935)..(44093)
  CDS (45965)..(46108)
  CDS (46208)..(46483)
  CDS (47722)..(47963)
agtgccgcggggtggaggcgaaaaagtttcttttgcagacaagaaggggcttcggcgagccgacgctgctcaagctgcaactctgttgcagttggcagttcttttcggtttccctcctgctgtttgggggcatgaaagggcttcgccgccgggagtaaaagaaggaattgaccgggcagcgcgagggaggagcgcgcacgcgaccgcgagggcgggcgtgcaccctcggctggaagtttgtgccgggccccgagcgcgcgccggctgggagcttcgggtagagacctaggccgctggaccgcgatgagcgcgccgagcctccgtgcgcgcgccgcggggttggggctgctgctgtgcgcggtgctggggcgcgctggccggtcagacagcggcggtcgcggggaactcgggcagccctctggggtagccgccgagcgcccatgccccactacctgccgctgcctcggggacctgctggactgcagtcgtaagcggctagcgcgtcttcccgagccactcccgtcctgggtcgctcggctgtaagtattcttcccgcggggggagggggcccgggccgctggagattcgagaaaacaggagccggcggggaatggggttcggcgtgcagtcccctttttgccgtatagctccttctggcccaggccgcgatcggcgctccgtgggcgtggaaaaagaactgtccgggcctcagtttccctcccacgtgctttgcgggcggcgcaggtgggctcttggcgcgtcctaactggctgcaggtagaccagggttgggggccagtaacgacgccagagattggggatgaagtcctgcgccctaagctagccaaggggttcaaatgcttgctcctgccaggcccaggggagataagcggcaacctgcacacatcaggagtttgcagttctcgctgagttatgagtctggttcagttttagtttctagctgcgtcagactccttttcctgttcccacccagtaactgaagtcaggcttttcatttgggaagccccctcaacagaattcggtcattctccaagttatggtggacgtacttctgttgttctccctctgcttgctttttcacattagcagaccgtaagttcccactcctcaaccagattgtaaagactggtcggtagctatggaaagggcggaactcgattatccagaatcaagggcgtgatttctgtagctcctcagaacgcccagacggtttaggggagagcgcagggagctcttatgcaagtttttggatttttagctgcgaagtctgaaaacctgaaatcactgccaactgcgtgaagaacaaggaagaaaatgtaatttagttggaaatgctgatcttttccaaatgtcatctcttttcttcctcagtcccagttttaaaattggagtgctgtaaaaagtaaacaatcaaaatttgtattttttaaagtagttgttctgtttaaaataaaagtgcacttcatacgtaatcttatattttgacttagcagaattgcaatgaaaattttaagtttttaaaacaattctagtgaactattccaatgccctaatgtggtaggaggtttggtcaggtgtttaagaatttatattttaaaattattgtgctaatctaaataacttttgtgaatgtagaattgttggccatcagaaagtatattccttgtgtttttaataagccttagtttaataaagtagaattagtattggattgatatttaatttcttgggacgttttatttagtagtttttattgcaattggaagaggagataaggtctttaaccgaaagcagggagactttcaattagttgtggctaattctgttaaattgcctcttgtggaggtcatgctgccttattcatgagtgaatggctctattgacaacatatggaactgaacatgtaaatgactggaggtgaacacttaggaataatagagggatgagaaagagaaaatgaatacagtgcttcctggagtgtatttagatatgcttagattattcacggcatctaacttgtattcgatagtttttcaatgtcaagttgtctattgtgatcatgctagtgtgcagtactttttttcttttttcctggatttagatgtttagaaaaaaaatctgtgttgcccttgatcagaagttgagttgaaccaaaaggggttcgatacctatttaaacattgtcttaaaagtagctgacctaattaggattttgttttgcagataatttggtggcacactaaaaacaaattagagtttatttggttagcacagtctttaattacatttccaccagcagtaaattgtctcaatactagcccacattccttaaatgtatgtgaaaataagttccacttgtataaataagcactcagtctgttgtcaggaaccctgctgtgatcacttattggacagctctgtcattcctgtacttctgtgacttttaaccatctttgtaggtgtcaccaaaccatgtggtctggattctttattgtaaatatttcttttgtttgtacctaaagctctagaggtctcctctttccacttttgaaaggagcagaaaaacacgtggaattgagttttactttctctgttatttggtattttagaataggtggtctaaaaagctactaaagtttttcgtaattagaaaaatcgtcttaaggagatgatttccgagttcagatataaatagaaaaatgcatgtttttgttccccatatcttaccttccctttccttgggtaatcaaaatagtaggagtttgtctttggactggcttatgaaagcacttttcagaaaaagttcagtgtctatcttttgtttcatttgttgaatttgcaagtttaagaaaaattacgtgtgtatgtattttttccactttatttggttgtgatttattactataggagtcccatgtgtgaaaagtcgaatagtttgagctgtaaaataataatactgtatcagtactccttttagaaaataacctctaatgctttaatgaaagtggctcttaaagagtaactatgtgagcgagactttgtctaaaaaaaaacaacccagtaactacgccaagccttgctcacaactgccattaaaggcaagctagagtttatgtcaagagtttgcgcttaaacagttctcaacctaaagaggaatgcttgttagaatgttatttagcccagagacggaaaagttgctaaattgccaatgagaacttccagtattattaaattctcactggcatttcagaattatttgtcttatgtagaaatgtttgagttctcaacaggacccaggcgaaagtcccaaaggtagtttctgctggtgtgacttctttagtgttgacctgttataaatcttatggtccggaccacagttgggggtggggtgggggtaatagtccttatggttttcacagctgtttttctgtattttccagactaaaacttgaatatagcaggctgatttatgagtcactttggatcagtgtcttaaaacagctatagcctggctttttgtttttcagctttccagatttgtgctgaattagcagctctgcaggccccagtgggattgcttaagaagctgtgctggatttgcatttaaaatttgacttggaagtcagatttccaaatgctaaaaggaagaaaatgacagcttgaaccaaatgttgcaaattgattattttcatatatatttattcatttgctaatattcaggaagagagaagtctgtctaaccatatagaaagagtttgactttcaagtgttggccagctgagctctgggtacagttaacacttccgtaccttactacctttcccattcattaaccccactacaaaaagtttttgtaaaagttttgtggggaagatgctattaatggaactctaaacatgaagaatctgcctttcttattgaatgttttatgatctgggtttaagaaaacatcgacgttgtacaacttgaatctgtttttaatggtctagccataaaaacaatgtaaggaagatttaggaaaatgtgacatcccttaactggaaagtaatcatttctcaaatgtaaactatattaaatctaaatttaggtacactaaaagtttcatagctgtaagtatttagcagtaaatgtcatttaaggggtgttttttttcctcctacatataatgtagttttaatagtacacaaaactcaagaatggaaatgtgttgcaataactgaaatattcaaagtttcaagctcctgcttctggatcagaaatgaggggtccccagcatgtgcactggtctctgaagggagtttcttattttttacaggtcttttgtaggaggaatcttatcccattactagttgaaaaaagttaagcactccgtctcatttctctcacaggattgccctgtgaaataatccttaaaatgaagttaatcctcagttttagtgtttttttatttttaattaaaaagagaatcacctgtgttaaatattaatgccagattgcttcccctttctttttaagacctgaaacaataggggatgcagttttacgctggctcaatgctctttagttaagtgggtccaaatgagactttctgttgactcaggctacctcccaggtgaaagactcttttccttggttgttttttaaaccatgtgggaaatctgtgactgtctggggtgctaaaagcacacaggttttgtttgaatcctaacgtgagttgttgggctcacggtttccttgatgaactccagatggacttgagctgggctgcaagggaaagtgtctggctccagccagcgtggtgagcatgcacagcagtggttgtaattgcaggatttttatagtttaaagactgtgccagatttttttcatgttataactctaccagaacaaatctactcatgtctgtcactgtctggtaggtctttgggcaaacatacttcaaataaaaccttgcagatttttttttttaggtgaaaaagagaatccaggtttattctcaaaacagaaactcaaagactgaaaggaactctgatttctaattgttaactaaacactgagtaacactgtgcttctctggaggtgatttctctttatttattttttaggaggggtgtacttatgcatataacaaataattcatgcttttctccaatcaactttggttatttaaaaaactccgttttaaacaccaaaaaaattagtatgggttggataaccctttcagtgggaagcttcaagccatactatttgttatcccggtttttcatcactctggaaccatttcatttttattacactattttgaaggcacatagtcaatgtgttaacacatatggggaatataaccaagaatatttgctggaatttgttccatattttgaatcttaaatgagatgactttctagcctagagtattgtatatgtatgagtttgttattgtttttaatagtaatgatgttctatggaaattgttactaagttaaattgagttattgagtaagaagcacatttattttaatgattgaaatctgttcacaagtttttgtgcaatctgctgaactttgttagatggcgatgtggtttaaattttatattatcagatattgatatttggggaatttaagaaagcagagggttcagattgttttctaccctctcaacactcacacacaaaataatgctttaaatgatttggtgctttaacgcagagaaacaaatatgtatgcaaagcaatttctgttttccttgactgcaataaggacattgatgcttaaatgtatgacaataaaaagatttctatagaggctttagtttcagcaacctgcctaattagctccttttcttaaaccatgatgtcatcatatcaggttaggagtggggagatgggagggtgaagcagacctgccagttcacaaaagatctgttcaccacgtgccaaaaaaacatctcttaaaacatttgtgggcttaaagtatttgaatctgccagtctccctaaactaattttgtccttggagcttgtatttttgagtttggcattttggttgccatctagtttgtggacagaatagaccaattatttctcctgctctcactggtgttcatagagatacttcataagcccagttagcactattagtgatttttagaaatgacttataattttatttttgttttcttatagggacttaagtcacaacagattatctttcatcaaggcaagttccatgagccaccttcaaagccttcgagaagtgtgagtcttcgttattttgtttttaaggtttgagtaaaatacgttaccccttatactatttaaccgtaaggaatacttggattatagtgagttattcaaaacttttaacttgggtggtatcttgaaataatatgtaaagttttcacctctgtgaattacagattacctaatcagcttttctttttctttttttttttggcatttgtaggaaactgaacaacaatgaattggagaccattccaaatctgggaccagtctcggcaaatattacacttctctccttgtaagtgaatatcagcagaattcctcatgtatgtttgcaggaaccttgagtgggagttccatagggactagcatagagatcttagaagaaaaaaatggaatatttttttcagggcatagtaaagatacgcgctttaaattggttaacttgttttctagcctctaactctctcactgctaaatttcatgtattcttataacaacacactttacactttgctgttgttgccgaactggtcttcgagattcaaagaggccagctttacaccatagaaatgtgtattttatcgtattctgtagactaggactttaattttagtatcgctcaatggttggcatggggatctgtgggttatgtattacgtagttcctagtggagaatgatcagagttgctttgtgaggagaaaccggagttgagaataagccattggagtatcctgttttaagtgtggtacctgcagtgtaaatcagagttcagagacatcaactcaaaaaaagtaaatatgtgactgaagacagaaataactttgcaggttgttttgcaaatatgagttttcaaatacaattaaggttgtaccaagttttctgtatttttagtgtaggtaacgttgtatatacatgcactgacgtaggttttggaataattctgactttcagcatttaaaggtagcatttagaatgcctgtggtttaatttctaaaatctaattagcttaccaccttaatcttaaataatttaaaaatatatttaagctactgatgttaaaaaatgtttttctttaagcaacttaaggaaaaaaccaccattgttagttgcttctgagagaggtgttgggagggttgaaattatacagtaaatttcaggaaagctgttcaattaatagagtgatcactacccaattgcttacatctggtgatttatagaggtttgtttttactgagggcccaggtcagctaagtcacgggtgcagccgctgtgtctgctttcctctgtttgaataagagctaagtgacatttgatactgatgtggtttttccaaagatcagaaacagaaaggagtgaaagaaaaagcagtcggtatttgacaaataaacactgtatttaaaaaacatttttatgctagcataaataccttttttctttgtcttttacaattgcttaaaattttagaatctaaatggagtgctggttttggtatcgtaaacatctgcagctattcttgtttgaccaaggtggcctttttaaattccactttgctcttgctgtcctcgcactgcatattggcagattctgtcagtatgtttaagagagcttgagggtcatggcatacttcatggctgagaggatctgcagtgcagttttgtaatctgggcagcatggggaaagcagtctactctttggcatggtatagcgttgagagcattaagaacttgtgaggaagttagaaaattataagtaacctagtgttttatacttttttttttttgagacagagtcttgctctgttgcccaggctggagtgcagtggcacgatcttggctcactgtaagctccgcctcctgggttcacaccattctcctgcctcagcctcccaagtagctgggactacaggcgtccgccactacgcccggctagttttttgtatttttagtagagagggggtttcaccgtgttagccaggatggtctcgatctcctgacctcgtaatcctcccgcctcggcctcccaaagtgttgggattgcaggtgtgagccactgcgcccagcccctagtgttttacactttaacgttataacttataattagaaagctacaatgatctctcaaaagttagaaatttgtgctcctttaaaatttgtcctcttctccatattgtttttgtgtttcactttagcaagtgctgggtgtgaaatcaccctgaataatttcactttctttctccttaatgtgttacaatacctctggccagtgattgctttgttcgtctcacataatgatacatccaatgtgttacctagattacatagactctgcgaagagtaatttatatcatgggcctgataattcaatgtggagagtaaaaacttctttttatacctatgaaatatcttgaaaaatttacctctctggttgttttcatctacgaatgttttgtttcctcctgcaggcttgattggatattgtaatatacaattattgtttctcaagcacttttaatttgtgttgtgtagagtaaaacattttcttttatataaaaacacttgaaaataaagctaaaaatgagttcttaaatgcttttctgagattaaaaaaaatctgttaagttatataacatgacacagattgaaaacttgctgtagcgtcacaattaaatctcatatctttcaaagtagtttttagaatgatttgactttcatattaagagttttttgtggttgttttttgtttgtatcttttacattttgcagaggaaaacatttttatgagttatttgcacaggttaaatagtttgaaagcttgtgtgtaaagaaaatgagtaattagttgaagtcttaaccataggatttaatattactgctccatactctttctactctgtgccatgaagacccctcccagctggaggggctgcatgcagagaagactgtcctggtgagacttttgtcttctcttagctataggagccaggagctgataattagatcaaagggtaccgcatgtccagagacaaattcagttagggacctattctcataatatcagggaatctgggatgataggaatctgcgataatcttcccactaacaaagctcatctctaacctttttagcatgcacaaggcctgaatagacatgctttcctttgaatcccacacagaactagctcagaagtcaaccagtgtgctaggtgcaaggcatgatttgtatgttttttaaatttttctctcacaatatcctagctattgcaggatgacatattttaaagaagtggaatagtctttggaatgaacatatcttacagtaaaactctattgacctggcttacatgagggagttgatttttctgaatgtatgaactctggctttgcgtggtgtggaatgacctgctcgagcattggacatgattgaaatctgtgccttgggttagggaagtttgaatctgtgagttctacagcattgtagttgaacaaaagagccttgttggttattaaacggagctagttgggtcttagtcttgatgctaatggtttatatagtgttacccagcatgcagatgcttgcctggtgtcctagagttgaagaatgttaggtcagtgactgtcaaagaggcacctagggtacttgttttttttgtttttgtttttgtttttttttgagacggagtctcgcagtgtcacccaggctggagtgcagtggctcaatctcagctcactgcaagctccgctgcccgggttcatgccgttctcttgcctcagcctccccagcagctgggactacaggcgcatgctgccacgcccagttaatttttgtatttttagtagagatggggtttcaccgtgttagccaggacggtctcgatctcctgacctcatgatccgcccgcctcagcctcccagaatgctgggattaaaggcgtgagccaccgcgccctgccagggtgctggttagattatcagacactatccctagagattctaaattagtagatttgggtggggcccaggagtatccattttaacatatgcaatattcttatcagatattgcataaatatttctagaattactgataaaggtcatatcataatcaactaagccttttctctttatttcttatctcaaaagtaaagcatttcttagtccatcattgtctttatagcctgtcatcttcccagaggtgacattgtcatcattccagagaggttattatatatattgattacctttgctggtaggacaccgaaacatgtactctaccaatggaaagccattgaagagacgtaaagcagaatgacatgatcagagctgctatttgaaaatgtcatactgtctttagtgtggcaaatgacttggaggtggcaggaggatggtttagaggggcagataattaaaccacatgatggctgagaagccatggtggcctgttcttcagtgaagtcacgtcagtagaacagtgattaaaagtaaagctcaagtcaggtggcctggaattaacttttggctccaccctttgccaggtttgtaaccttgggcaagttactgactgactgtgtcagtcatctctaaaatgagaataatgctgatgtctatctcatagagttattgtgaagatacagggaatacaggtaaagctgtcttgcatgtactgagtgctcagtgaatgtgagctgtgataaggatgacgattcattcaactacaatgttttgagtatctactatgtaccaagccctcttttaagtgctaggacacccagtgaaaaagcatacaaactccctcttatcctgacgcctgaggcttccattctagtgaggagagaaaaataaatgaagaaaagaaaagataacatcagttcatgatcaatgctatgaagagaaagaaaggagaatgaagggattagagagctctggcaattgttctttaatgtagtcaggaaaggcacatatttaccaaatcctactatgttctgggtactgttctaagattaggattcagaaagcagacaggaatccctgccctctatagctgacctgctcatggaaggagaaacacaaaaaataaataagagatgtgatcagaaggggattaagtcctggagagaagcagcagggaagaggtgtcggaagcatgtggccaaagaggggttttacagttttaaatggggatgtagagaaaggcttgccaggaggaagatacttgaatcagggactgaaagtgagggagggagttgtgtgtgtttctggggacattgagtcatctctgctgagcctgccctgccacattcaggcccatcttaccttgtatatccaacttacgcagtaattaaataattttgtttatatttttatcctctgctgtattttgaggcctctgtagctaactcttcttttcctcagcacttaatgcaggtatatggcataagttagtgcttaattaatgtatgaattacattatctatgaatgtatgaattaaagaatattcatggaataaccacatgctgctgcacttagcgtaattcagacagatctccttctatacacttagtttaaaccagtggctaaagatttacagtggcaacagcatacctacgttttacataacttgtgttcaactatgcatgcttgagaaaataataataattctgacaatagcagcaataattaaaagtaaaaaaagaacaagagaagtcacttaacacaaggattcagctgaccaccctagctggtgagtgtatgccctggagtatgtatgaggtgggaaataaaagccccctttcccatatgcctttctaagcatgaatatctcagcccactgagggtgactttggtgttcaggcatacagctttttcacggcccctgtgcccttcacatttctgaactactttgacaggccctgaactaaaaatttaaaatgcacaacagtgacaaaaccctcctctttccacactgatctcttcccacactgaaggaaaactgcccatgttagattcattgagaggggaagactgtctacataaagtaccttgctggtgtcataagagatcttcaagggtgtgttgatgatacatggttttccgccatctgctggcttggaacctaatgccgcgagatgtggttccatcacatcatgcatccttctgtattggagatgctttggggatgcaggaaattaggacagtcatgcccattgctgtgctacagagatcaatactgggtggtagggagtattggcaatttgtatgtcattaactatagttattgtagaatcccaaggatggcgatttttcttttccagttttgaagctttcacaagcacagcatgtgtagtctctaatgacatggtcacacatctccttccagggtccaacttttatcttagcgagctctcaatcccctcagcccactacagtctcagacacacagaaggtgctcactaagaatcgagtagacaagagaaatcacgggcccttgtgcattagaagagagccctgagctgggaattggactcacagatgcacaggttttcgtctcgtctcacactactaacctgtctgaccttagacagacttaattaacttttctttgtttatctgtgaaaacagtctaagatgtctgcccatctctctcctggggttccggtaaaggatcaaatggcataatgtacatgaaagagttctgaaaatgtgagcgccagcagctgctgcttttgcattgtggtgggcttggcagaggagcagagactggaggcagtgggccaaagtggattcttgaatgggagggtcacaggaggaatgcaggatttagaaacattatcctggcagcaagagatgagggaaggaaaaaccattttgcattgggggtgaattttcaggaaaacttctctcttcatggttcctaataattttggtgggtactcaattataaataacaacaatatttgtagcctgagggcttttgtatctataaggtgaatttcaagctcttcagaatgcccagcaacaatgcctactgtgtgctaagtgctagggaacaaggaaaaataggatttggcctccactttcaaggtgctctgaacaagagagaagacagacggtaaagacatagcacacgtggagtgtgcctgggacagtggaagatgcctgggcatgtaccagcacataggtttcaggatgtgtggagcgtgaggggaagtgaggtggagaaggaaggaaacttgtgtgagtttgcagggatcagctcaggaagcttcttccatgcttaggtggtttgcatgtttggggagtcttcattgaagacttttttttttttttttaagcaggggaataaaatgactacagttaagcaaagaatctacttttctccttgtgtttgatagtactaaaggtcatttcattttcattcattaaagtcatttaatttttaaaatcaagtggataaaaacaaataaatgtggctttgataataattttgacttgccaaatgcctcttttccattgacccctggagctgttcagtgttgtgagccctaccatgtgttagggccacatctctttttctcacaaagggaaactggccacgaggtgggagtcataggagcgttggcttatgaatgatgaatagggtagagttggccatagtgatcacaaatcagatctgcaatattctgctatttatatactgaacccagcatcatattaagtgagaatttcattcataagcgtgcatttctcattacattccaaaaatcagaccatgaaaaaaacagctttgggaaacatttgagagactgttgcttgagtacatggcacagagtttatttaattcatcaaactcaacatataactttaaagtaatattgatattttaatatgctctgaattcagaggtaaagttgcaaagagggaaggcaagcattaaatgtgttttcaagtgagggtatctcttagtaacgtgcagtagaccgcaaatagttgctaccttttttaaaaaaagggaacttttataactcagtatttgaaaagtggtcatcagtttttcatattaattatggaagttgaggagcagctttagccacagttagaacttaagtttctggggaaattggagagttttgtttttattaagtggacagaaaccatatcccatccttatactctgatctgagtatagagaaacccatggaatttgacatctttactgccaaatttatctaggacgtgtgctctcctgatgcagatgaatgggctgtttgcttcacatgtaaaggacatcattttattagaggttgtcctagttcattttctgtgcttataacagaatacctgaaacctatgcagaaagctatacagaatacctatagagtctttaatttatgaagaaaaggaatttatttcttattgtggaggctgagaagtccaaggttgatgggcctcatttggggaacctttttgctggtggggactctgcagaatccctaagccggtgtagggcatcttgtgtcaagggggcctgaacacgatagctcaggtgtctcttcctcttataaagctaccagtctcactcccatgatagctcattaatctattaaaccattaattcatcagtagactaatccattcacgagggtagagccctcatgacgcaatcacctcttaaagggcctatcggtacgaccacattgaacattacatttcaacgtgagttttggagaggacacatgttaaaaccacagcaggggactgcagccttcaccagtacatacaaaccagatattacgtttagtggaaataaacttatgcagctcaagtcttacaaaataaacacataaacgtcttaatatgataagttgtaatcttttattggattttaaatgtttatagatgacttacacataaaagagagtttactatacacagagctgtatttgtgacaaacactgtaagtttatcttcacatttaaatataaactggcccccagaattcaaggttgctaggtttttgaattctcaatttagaatgactgtatttgacacataaatttgtaattgctgcatgattccttaaacccttcaacagttcccattgctctgaggtgaagaaaaaaatccttctcaagacgtacaatgctctgcatgatctgcatcctgttggcccattgagcagtctctggagtcactcctcagttctccagatgtgccaggttgttccagccctgtgttcttttgcatacgtatttcccactgcctagaatactcaccctgcctgcactgtttaaatcagactcttaggtttccccttatacatttttatatcttctttattataatgtctactttatcatcatataagtaattgtattttttactcatctatttgttattcttttaaaagaagtttcccccaccaaaatgaaattttacagcagctgagatcatgtcttttattttctccattgcaaccctggcatgtagcatagtgcctggcccatggtggatgctcagtacatgtgtgttggatgaatgaatggatggcttagtccagattaatatatatgggtaacttttctgttcctgtgtctccattgttttccttaataagacttgttttttccaaggtaatgacaattttagatttgacaatgacccattttgggcaacctttctgtggtgtttcttgaagcccgtaaaattcattcccacctgcatgacttgacttttcagtatagcttgccacaaaaactcttgtattaccgatacttatcctgaacccacactattccctcatgccctctctcaccttcattctagtaatagccatttcagttggtgctttaaagtatcaggtacagcttctaccaagagacttctctgtgccaaaaggagacttgttctaccaagagagacaagacaataaagctacagccagtttcttttcatgactgggatggcaagattcaacatgtgtctctctcctggcctagttatttttcccccttctcttccttattttggtttctcagttgtcttctatagggcagaggttcagggtcctcgtttgatggagaccaaagaaatgaaacagagctctagcagtaccacctcctctctctttggctgaaagttgcttaagtactaaatttaaaacatgaaagaaaaggcaattcttcacagaattggaaaaaactactttaaagttcatatggaaccaaaaaagagcccgcatcgccaagtcaatcctaagccaaaagaacaaagctggaggcatcatgctacctgacttcaaactatactacaaggctacagtcaccaaaacagcatggtactggtaccaaaacagagatatagatcaatggaacagaacagagccctcagaaataacgccgcatatctacaactatctgatcttggacaaacctgagaaaaacaagcaatggggaaaggattccctatttaataaatgctgctgggaaaactggctagccatatgtagaaagctgaaactggatcccttccttacaccttatacaaaaattaattcaagatggattaaagacttaaacattagacctaaaaccataaaaaccctagaagaaaacctaggcattaccattcaggacataggcatgggcaaggacttcatgtccaaaacaccaaaagcaatggcaacaaaagacaaaattgacaaatgggatctaattaaactaaagagcttctgcacagcaaaagaaactaccatcagagtgaacaggcaacctgcaaaatgggagaaaatttttgcaacctactcatctgacaaagggctaatatccagaatccacaatgaactcaaacaaatttacaagaaaaaaacaaccccatcaaaaagtgggcaaaggatatgaacagacacttctcaaaagaagacatttatgcagccaaaagacatgaaaaaatgctcatcatcactggccatcagagaaatgcaaatcaaaaccacaatgagataccatctcacaccagttagaatggcgatcattaaaaggtcaggaaacaacaggtgctggagaggatgtggagaaataggaacacttttacactgttggtgggactgtaaactagttcaactctagtggaagtcagtgtggccattcctcagggatctagaactagaaataccatttgacccagccatcccattactgggtatatacccaaaggactataaatcatgctgctataaagacacatgcacacataatgtttattgcggcactattcacaaaagcaaagacttggaaccaacccaagtgtccaacaatgatagactggattaagaaaatgtggcacatatacaccatggaatactatgcagccataaaaagggatgagttcatgtcctttgtagggacatggatgaaattggaaatcatcattctcagtaaactatcacaaggatgaaaaaccaaacactgcatgttctcactcatagatgggaattgaacaatgagaacacatggacacaggaaggggaacatcacactctggggactgttgtggggtggggggagggaggagggatagcattaggagatataactaatgctaaatgacgagttaatgggtgcagcacaccagcatggcacatgtatatatatgtagcctgcacattgtgcacatgtaccctaaaacttaaagtattataataatgaaaaaataaaaaaaagagaaaaggcaattataaatataaacacctgctttctaatacttaaaatcacctgcctgccatctccctgtctctcatatagctttattgagcagatagagcagtctctagagtgaggtggaaggcaaaatgaaatattaaggtaacattcatgctgcaggtaccatacagggtaggataaacatagtagacattctccgactgtcatttttagtgtgcatgagcaattttaaccatttttaaaataagaaattatgatatagaatcaaaatgagcattttttttacattttttttttaagaataagatgcttttgaattgagtcacatcgctttgtgatcccacacaaagtatcgacctaggatagaggacagtactcttcaaagatgaatggatgtttacagactcagggaagtagtcaattaattgtataaatctctctttctcttattctcctctggcctttcctgtcttaatttcctcagtacagttgccatgtaaatttcaaagaaaaagtgaaaggagttaggaacagcttgctatattatattatataactggttataacccatttgttgatagtttagtgcgttgttgcataattctagcaacttggaatcagaagagatatttttctctgtagagaaatccctggaagggtggttgtctgactgccctctccttaatcacttctaagaacgaaagctcattcttggtgagcagcctttccgtagtgactaattctaattgctaggtcttgttatacgttaagcagaggtctacccttcagcagcttctacctgttgtcgttctgtgtgctagagagagcagttctcttttctgcataattcttgtgagtcttaaaatatgagattttcttaaagcattcccttctcctgggttaaattctcattcccatttcttgtatgacatggggtatagacaagtgctgtccaatggcactttctgcagtgatggaaatgttctgtatctgtgctgtacccggtggtagccactagacacatgaatattgaacacttaaaatgtggctagtgtgacccaggaattgaattttcagtgtaaatttaaatagccactcataactaatggctgttatactggaaaatgcaagtctagagccttaaagtccgctccatcacacacctgtctggcatggcagtataaacacaatggccagaacaaggtaactgagatgtggtctgacttatacagaatatggtggggtcatctctcaaccagaataccagacattaatgaagtttcagattatattagcattttaagtaccatgttgtattattggctcatactgagtttgtagtcagctgttattagtaagcttgttgtcacttttcataagaattgcttttacatgggccttgtaaaaatgcttgattaaaattccaaaacactgccttatcccagctcaattctcatcttgctttttgagcatattttagtacattgagaggttttggatcacgattcatcaaatatgtgaattacacttttagttttgtggcatttgcacttggtcattcacgtctctatgttcatacaaatgtcgacagcacggggccacagtagctgccaccagctgcttccctaaaggttaatgccagtctgtgaataaagacaaaggatgtgaactcacctgcctatgtgataattgtcaccacattttctatgccttattcacaaggacaagataaatattctggtgaaataaagctattctgtgtctgcattctggtccgttggtctgtgtaccatatcagaacataaaatgaaattagtttaactgaatgtgtttatatggaatcaactgtctatatgataactgatgcagtgttttctggtttgtactatcatctgaagtgaaaattctttatgtaggctaattttaaaaaatacacaaatctaagctgaattttttttcagtaaaacagactatagtaacttaatggttttattttagtgtttagagaaaaactggtttcattcattgaatttctatagaaggcgtgctattaagcatgatggactgagtgcatttatttcactctgctccttcctaaaatccctttaaaataaaagtaaaagaataaaaagtgcataccaacgggagcaaagagaaaatagagaacatgaagagaagatacagttcaaatgaaagatgccatacaaattttgcaagcaaatggataaattgtaactgacttagagaaatagtgaagttgatcaaaaaaaaaaaaaaggtgcttgagaacctcaaagtggcttaggaatttagaacctataaagatgggagtgcagagtaggactgaaaacaggattgattaaaacttttgtataggaggatagaagtaatcagacctccaggtttcccctccaaaactcagcccagtaactacctttcccatgacacagaggtctggaaatttaattttgggagaccttaaatagaaagtacctgggattcaggacagaggcccagctgtgcaggggtaatgattgagggggggcaacatcttctgaaatcaggaaaattaagtcaaatatgaatactgaaggcaacacccccagccctcagtttatttcctgttagccttcccagatggtagcatccaagctctactcaccagactggagattggagaatttgggagaagattcacagaaactgacatgtggccattttgtcctaaaataggtccctccttcacctgtgctggcactcaccattcaacaagcccataccacacacagccctcagaaggcttttagtgctgctttttattaagtatgaatgagtagccagtgatcatcagacttttgaagacgtttctaacaatgaagtcagagtttgaaacaaatgagaaatgagaatcagagataaatggaaggagaaaggaacatcaaaacaaatttaatatctttggagagaaaagaaagggtactatgtccacaaaatcagaaaaacatgatgaaaaaaacagtaaaaggaatattcagaaaagttaaaaatacagtaccagacactttaaaaacataataaaaatgttgggagaaagttgaaaaactcagaaaaaagaaccaaaaaacaaaggtatggaagtcatgggaggaaaaaataagaaaatcggaagatgaactaaaaaggctaacacttatctaattggaatttcacaaagagacgtcagtggaaatggaaaggagaaaactatgaaagatacaaaattttgaatttcctggaagtgaggaatatacatttctagattgaaaggacctactgagttacgtctcaatgaaaacaaggcaaagatggtcctatgaggactgtgctcctagcacatcaccatcacctgggaacttggtagaaatgcaacttccttggtccccacccacacccagagaaaaagaagccctgaaggtgtgggcttaacaatctggtcttccagaagcccctgcccaccaatcctgatgtgtgctaaagtttacaaaacactggtgcagagagtcagaatggcctctggctccccaagctggcattatccatgagcagtgtcttcaaaatcctaagagaggctgggcgtggtggctcccacctgtaatcccagcactttgggaggctgaggcaggcggatcatgaggtcaggagatcgagaccatcctggccaacatggtgaaactccatctctactaaaaatacaaaaattagctgggcgtggtggcatgtgcctgtaatcccagctactcgggaggctgaggctggagaattgcttgaaccagggagtcggaggttgcagtgagccgagatcgtgccactgcactccaccgtggcaacagagccagactccgtctcaagaaaaaaaaaacaagggagaaaaggattaataacctaaactatacacacccaaattgtcctgtaaagatattttcaaacatgaagtgacagcttttacacatggtttcttgcaaagctaacaaaagatagaccccaggaaaatgaaggagcaagccaagaaagaggaagactagacagccaggtaatggggctcccaggaggagagaggtgaaagaaacccccaagagggagggtaggttctacaagaggctacagtatttacatgatgcagttgtatgacttctctgcaacaaatctggtcatttgcagtgtttctcatccagatctagagtcacaactcattagagctggaagagatcatttcatttcatttccctctgtttacaggtgagaaaattaaggttcacaaaaacgtagtagataaagacacagaaccaggaatagaatctaaatctcctctctggggagctgtagtttgagttactgtgtcagatcttatcagcaggttgattaatatagagtatcacagttttatgtttacgctttctggctggcagcagtaatggacattttgttttctgatgttcatatgcattttgaacaatagctaagttaaatccttatggtgcaatctacagctgctcttgagtgtctgcactccagtttgttcactctggggtcttgtacccattcgttttatcccgaattctggggaaccaaagataaatcagaggttctctccactcacaagtaaatcacaagcctagtaggggagactcaaaccagatcaatggtccgatatgtgaaaatgacggtggaaggcctctgccccaaaaaagaaacagtaaaaatttttaagtttactaaatcaaagtagagtccatttttattgtacataaattacttcagattaaatattttttcaatgttttctttatcctgttgtcttctaggatttgcttttcaaatttccatttacatgaaggactagattgaatttatacttggagatcaaagaagggctgttttgtatgtggtgtgaatggggcttttgacttatttttcttttattgattttttgttgttgttgtgttaagagacagggtcttgcaatgttgctcaggctggatttgaactcctggccttaagtaatcctcccacctcagccttccaaatagctggaattacttgcatgcaccgtggagcttggctcatatttcttttttcatttttaacatgtgttatgactggtgcatgaataagacactgattattgcaggacctctatattaaaatattaatacatggccatctttattatgtttgtgatccaaaggataattatattttatgttgacctgactttttgctgaaagaactgattctttgcttcttacaccaacactcgtttgctggttagtgtccttaattcttcatcaagaatctgtctccttacacaagtttcctcagttggctttattctttgatgctgcagtaccaatggaccagtctaaacatgtgttcttttaatgaaacctcttaattatctttttagaaaagagatgagcagtttattttttatctatatgagaggagttctttgcttgccaaacttctgttaaaagttgcctgatattatggggtgttagttattccagtcaagatagttttcaaggaagcttttcggagggagtgggggttattgttggaaatataagtgacctttaatgtgtttgcagaatgtagtgttttctttaacagtttgtaattcctttataaatggtgctaagctggttgtttgcaagttatatatagaaattagtatttccttggggccaggcttgactgtaccagtccatacatttaatctgcttgctcgatggttgtttgtatggaatgaccacagattcagcaatttgttagttgcaatcactgaattggacttaggggatgtggttagagtgatgcattctaaggaaagacggtattgcaaacataaaaaatggcttcacattaaatttcagtgcacacatcctctaaaaggcaaatgctgcatgcagataccttctctaaattgcctagattgcatgtccttacacatcacagctgcaaggtcttaagctgcctgttatccgtgtactaggtaggagacagctaaaactattgacagatatacattattcaacaggaagctacacttttgttggtttaggaattccagtgtgagaaaacctgatattctggttcctcactaacaaagaatattccactctgtggttctcctttcagaccctggaattaaactaacaccatttatatccacttaagagagcatgaaggttcttttgagacacttatgctttctggagattacagtgaatcaagaagtagaaccagtcatcacactaagtggtcatatcactaacctcataagttatattttactgttgttaatttggtccagatttagattcaaggcaggtgttaagagtatccgaacaaactagcacagttcttatatgtgagaataatgcacttatccattttcttagtgattacagaggcattaaaatgccagtattgggctgttctgggcagtagcatctcacacctgagcacagggggaccctagtctgcactctgtgtcttagaaaacctcccatatcagaagcaccaaatgcaatggtaatggatagtgaatgagaactccagtagagctgaactgggtccctgtggccagaggctgcagagctggaagagctgatcctgtatgtcagggaaggagaaaagcacagtgtgtgccctggaaaccagaggaagtgtgatgtttcgccccccaagtgggcatcaaggtcgctcgtcatccttctgtcgtctgtcctgcatgaagttaggagcctccgattggtgcccttgcgcctggtcatgccctcttcctcccagtctttccacccacagccatcagagtagccattctaaaatgtacatgtgatattgtcaccccaccatttgacatcctctggccccctccccacagttgatcttgagataaaggtcaaatgtctgatgtggtttccagggcccaacttgactgctgtcatctcccggcggcctcactcttgagcctcttctttctccactctccacccgtgcactctgtacttagccatcaggtgttccttcatttcctctaagggaagctttgctctgctctcacttgcccaaatctttgcctcggcttagagcactagcctctactgtcctttgctgagctaactcatcccacagatctcagtgtggccgtttcttcccttcctttgggaagttttgctgacctccaacattctagaagtctgtccacagtacttccactgcccactcctcctttcctgtcgctgcacttaccacactggacagctccctgttgcctgctatcctccccactagactttaagctctgtgaggtcaaggggcatgtccatcttgctcatgtagaactccagtgctctcagagtaaatatcatcagatgaaaatggtaagccatgtttgcgtctgcattttaaaggtatttggcaaagttggctgaaaagtgaaataggcaacaaaatgaaaccattatcactggacccgagaagctgaggccaaaatacgtggttctcctgtttttccagtggtctcttagaagcctgagggaaccatctggtgttcctgaccaacccaagtccccaggtctgtgtgtccacagggactaattatacttcacttcagaaattagttaaccatggaactccctgtactatcaacaaacatagaagaccaaaatattcctagtctctaagatggatttgtacaagactgaaacaccttccagtatttacagtttattttgtgatttttgaacaatggaaagatggtgtttccacattaagtaatggaaaaaggtattcagagttttgtttttgttcaagcgttgcacatttcctgccaaaaatattaattaactacagcgctttttaatgtgttgatcaagtttggcatttattcctatttggagaaaaatgaaaggtggggttgagttgaatctctgtctactagaagtgggtatttttgaccaactccataaaatatgtttttttttttaggattctagatgataaaaaagattttttaatctagcttttttaaggtagttgtctcccatttttagccccctttattatacaaagcaagttttttgtttgtttgttttgtgttaaactggtatggtgtatatcaggtgggtacttgccagttagtctgagagctaataagaaacgagtatttggatttaattcagttccattaggacagatttaaatttttgtgatacaaggactattattctcacagttgtaagggatttttgtgctaggaagcagtgctgacaaagacagcactgtgcacgctccgtctagaactgagcactttcacactgcgatttaggaggtgtgcagttcaggaaattgctggctttggctggagcatacttttactgcaaggaaaattttattcgtcactcaagtaattggcagttttaataccttgttcataattaccttataaacaaacggatatataaaccaaagactgtatggtctgttatctaactggtagccttatttgaccaacgtgatagacacctgtgggcctccctgcctccccacccccaactaatttgctttgtttattgcacacatccatagctgagtgttttgtttttgttgttgttaaatacaagcgtagctatacttgcctcagacagcctggggaccaaaaccagatgcaaagtttgaagggagatagggctagggataggggaggggatagagagaggggcactcgggcacttcagagtgactccagtgtttgtaggaggacatcctagtaatgcaaacatttggattatgcatttaagagaaaacttctgtcccctagagcagtgtggttttatttaacccacacaccctgaccctaaggccttgtggcgtgtctcctggatggaatccatctccgggacctaggaattgactaattgtctcacttgcattaccctatacctcacagctagatcaaggactttatacacaggcaaatccagatgtgggaaatggtcaaaatcagaggtcatggctgacttgactctaaacaaaagcctctaagactttatgagaatctgaagggcttgatactcatttgtgacttgtacatgggactgctgaatcgtctcttttttaaaactttactattatcataaagttcagctcttaagatatacattatctatgctagttacctgacattagattttctgatgacttggattttaaagttggaaaaagacaatccacccacagtccttaaaaatactgttcagaagagttttaacactatttcgagaagctttcttaatttgttctttaaatttaaaatgtatgcccgttttgtccccttattattctcttgtgaagaaggtggcacctgacagaaagtcggccatctgactctggtagatggtaaatacacacaagccctggggcctcctctcacctgcaaagtgggcaagcacagattgggagggcctctgttctggggcattcttaatgttggcatgatgatggctcaatgagccagggtagattcccagatcagtttaaaaccagaagttcagcatttttgcaaggtgggaagtagcggcctttcaagggaggtacatatctgcataagaaattaaatgccagaatatctttcatactctgtattctgtgaaagaagccttaagggattgctttaggaacaatcagacttgttctttgagctggctcgggaatgcttgaacttgttaggtgaaaagccctaattttaagatgttttgtaatgtctgtaccagagaaattttattatgattaaagggcataatatatgaaaagtgtttagcatagggcttggcacttaatcgatcttcaatattgttagattttatacacattctaagggtgatatatagagagaattctgcttctaagaatatctcagtatggcagagaagaccagtggtgtaagtttgacgtcagcttgcagcacaagattttgtgaaaatatgtaagaggtacacctcacttgggaacctactgtgatagtgagagactgatgagttacaataatgcagaagagctcagaacactgtagaaatccagttttgggtgcaaaaaatacacaagatatattttgtaagttttctttttaatcgaagattaactgcagaccgtgtacaaacaccagtgtgtgacttatgtaagacacagaattctgtttagagcattcagattgtttcattgtttctcgcgttgtaaagaggagacctttctatgatttgtaggtatcctttctaccttgacgttattttctcctgccaaaagatggtctaaaaaagaccaaactgcctgatctaatatgacaattatgatggcttgcacatccgtttgattgccattttctaacaaaattgtcatttaatgctgcattttcccttgggagttactatattgattgatgacttttgaagaactttgaaatgacttcttttttttttttctgtttgtttctttccatttgttcagtataacagtcaccagtagaactttacacaatggtagaagcattctgtatgtgtgctgtaccatttgatagctaccaggagtggatggctattgagcacttgaaatgtggctactgtgactaagtagctaaattttagcatttaatttgaattaatttaaatttaaagagcctcatgtggctagtggctgccatactggacgtcatggtctgatgtttaagacttttaatgtaaaacatgtttggatctaattatgccaagggattattcaaactggagtgttcttcttatgtaatacttttgtactattgaaagggctggagcatattcattggtgttgaagactatggcagtgccttgaaacttgctatttcttaaagaaaaggggatctctctagcatggttctagagagatccccaatctgacaagtattttaaattcattggcacctgtaatatgggcacttttcaagagaagaattggaaatagattaggaatcaagaagaaggaatagggaattaactcatgagtgcctggtatgccaccttggtgttaggcatttcgtataccatttaataaggagaagggagcagagctgttaagaaaaatagccaggtgtggtggctcacacctgtaatcctagcactttgggaggctgaggctggaggattgcttgaggccaggagttgagaccagcctagagaacatagtgagaccccccgactgtataaaaaaattagcgagatgaggtggcacttacctgtagccctagctacttggaagctgaggtgggaatattccttgagcccaggagtttgagctgcagtgagttatgagtgtgccactgcgctgtagcctgggtgacagagtgagaccctgtctctaaaaaataacaataaataaaaatttttaaaaaaaaagaaaaataggataaagaaaaatcaaaccactgtctttaagtgcatagcatttagacagccacagctgctaaacagaaccccagatttatataggaatgttttccacatatttgaatattatgatttataatttaatgaataacttaaaatggccatggtattgctctttaacttttaaaagtactgttcagattagtcagttccatatttctgaagaaccagtcaggaatagaaaatatttttcttctttcagattgttgtaccgttaaccttgttaactgtggtttcttttaattctagggctggaaacaggattgttgaaatactccctgaacatctgaaagagtttcagtcccttgaaactttggaccttagcagcaacaatatttcagagctccaaactgcatttccagccctacagctcaaatatctgtaagtgaagttttctttagcaaaaactttcacctgtaatgaaaatattacaatgaaaaaataagatataacaaactttgtctactttactactgatggattgaaagtataatttattgacttgaaatttgctgtaagctcgaatgaccacaatcttcagtttattcttacacttttagattacaaaaaattacatattttttattagaaaacctagatggtgtgaaaagtgctcatttttaaaaaaacaatcaaaatcagaccattgctatgttttattaataaatgaatgtcataaaaagtggatatttataaaaaaattttgcatccgtcacatattttaatcactcttttcccagcaatatgtgtgaatcttaacatctgtccttgaggacctaaaaagtaattattttaagtttccattgatggttaagttctctggagactccttctaatacagagatggcctgcactttaacttgcaaataaatcagaaggagaagctcatctttaaactttcaacaggtatctcaacagcaaccgagtcacatcaatggaacctgggtattttgacaatttggccaacacactccttgtgttaaagctgaacaggaaccgaatctcagctatcccacccaagatgtttaaactgccccaactgcaacatctgtaagtaaaatgtcctcttagatactgtttctcacctcctccaaacccttggtgtcttttccttaaaatctacaatgtggcaaaaaggagtttaggagcaaggatgtagctgcctttcctttgagagttggagctgtagaatctccaaattggaaagagccttaaacatcatctcgtcacctcgtgccagctgctgcttgacaagacacgttagattgttactgaaagagtgaacagtgtaatcattgaacaaggctggtacaaaagtgccattgtggcactgaaaaaatccgaggtctcaacagctgtggtttatgagaataataccggcaactccaggaggctctgatagcttaagtggctgtaaagatctgtcttgttaataatggtagagcgatctgtgaacagactcctgcaatagggcaactttggctgcacattacaaacacttggggagcttttaaaaaatctcactgcccaggccacaccttagaccaattatattaggacctctaagggtaagatccaggcttcagaaatttttaaaactcccaggttgcgtccagtgtgcaaccaaggctgagaactactgccttaaagagaaagcattaaacctaaaaagaagggtgaaagatagtaaccaacttgtaaacagattgtacaggataaacttgaggcccagctccttgatagacctcatgttttagtgtaacatttaataatctcattctggattgtttaaaaacaaatcttaatttgtttgtgtctatactgagtggacaagactttagaaattaaagtgcagtctagtttcagtattttattattccaaaaacacatgacacatttcagtaggaaattcactgcctgcttaacaaattgaaattctttgcaataaaaatgtttagaaactgaaaacactgtatgtaattgaacactgactggttgaactatattgtagtaatgacacattttattactacctccagaatttaattgtcatataagctaactcttgtaatactcaatgcagcgaattgaaccgaaacaagattaaaaatgtagatggactgacattccaaggccttggtgctctgaagtctctgaaaatgcaaagaaatggagtaacgaaacttatggatggagctttttgggggctgagcaacatggaaattttgtaagtgtgggttatcacagttcctactgaggtagtatgatcatagaatgctcagtgtacattcagcaggtcttatgtgaaatcctatgttaaaatctcatcatccacaatcttatttataagtcagtattcagttttgattcaggtaatgtgatcgataatttataagtacctaaatttagtatagtataaactatatagtatttttttgctgacgtcttcatataacaaaagctaaacatctaataacaataggaatctgtaataggttgtaatcatatgtcccctttgaagagactagataatgaagttttgatcctgcttttgattcttactgtaaatgtaggcagctggaccataacaacctaacagagattaccaaaggctggctttacggcttgctgatgctgcaggaacttcatctcagccaaaatgccatcaacaggatcagccctgatgcctgggagttctgccagaagctcagtgagctgtgagttgccttttatttattctcctcaggtttgagagcagggatcatgccagggcatgagcttcttaccactgatctgtgaaattttcataacaaagtttccaaggtgacagcttttttcacatgcaacctagtcttatttttgttgtgataagttgaagccagttctactgttgcagttctatgtcacgttggcaaaagcaatgatggttattttcaagtaaagagaacgtatttttttaattactgatattagaaatatttacttggatattattaaggcagaatttaaaaataaggattagtgtagctcatacagtacctgtcttttggaaaacaaatcattgtgttgaattgaaaaataaaagctattgcttttctcttttttctttacagggacctaactttcaatcacttatcaaggttagatgattcaagcttccttggcctaagcttactaaatacactgcacattgggaacaacagagtcagctacattgctgattgtgccttccgggggctttccagtttaaagactttgtaagttacacgttttgctgtcagtactcgaacgtaattggttcctaaatatgcccacttttctcctagcagatttcctttgttgtcaaggaaatgcatacagcctcagaagtagtatcttaatctttcccagatcagtttgattacaatggatccatttcatccatatgtgtttcgtatagggattaaaaaggacagtgatcagtttgttttggtgattacagtgaaccttctcaggatctccaggaaattggtaactgcttaagagggaaacaattttaagtccactaagtttttctttgtaaaatacagattaaaaattacttagagcaaaaaggtctacaaagggcaaggaagatactgtttatcatgccagttatatcctcaacctgatctctgtcctaagagaaagaaaagggagttaaattaattgacctttgaaaaatttctcaaatggtaatttaaggttgtgcaatgggcttttgatttttgctctgtcagaaacttttgctctgttcgctatttgaagcattacgtaattgaaagacatactgtatgctttggcgaacttctgcatgcgtggttggaagagtggttttaaagtttaatgtatttttcagactgttcggatcattcagaatgtagtcattttgatagaggaattaatagggccagtgtcagctttttcggattttagggaaaaacttaaaatgttgttgagggaatcaggcagggtgtaagaggtaagttggagaaaaagagttttctattattttgagagaggtggagataatgtggggaattatgagaaattttttacaaatgatatgccacctgggtggtgatactaggctttctgagcttatcactctaaagggaatgcttcttttaaaattagggatctgaagaacaatgaaatttcctggactattgaagacatgaatggtgctttctctgggcttgacaaactgaggcgactgtgagtatgaattgcctcataatttagctcactctttgatttaaaaattttgtcttcactgaagtcagctatacaagttgacatcatgaagagatgagaaatcagtgcttaatctggttaccacccttgatcctctccccaaatgcctgctgttgcgcaagatgtatattattaactttttcttccttaggtgaaagtgttttattcaacattttagtatgtgtaatttactttaatatcctcataataattttcatctatgttgagggcttacacttttggaattatcattgcgtaaaagttagtgcaggcacttccacatcttgaaatcctcaatgttgtactgtccccgtaggaatttttttaatgaagtaatctagtagccactgataatgctgtggtaggttacaagcaaaacaggatgaaaacatcttataattaaccataaaatggtcttgcagatggtcaaattacatgtgttaagccagcagtattcaaattcagctccctatagtcccaaactcctatggatggaaggtatccacagagaaggagaggaaggagaaaacgttcactattatctgctttgttagtgttctgagacagtttacttgaaataaagtctctacctattcctaaaaggactctgaaaaacagtgatttaacttaatcagcagagtgacttactgaatacctatttttgttgggctctttgttgaatgcttcaaaaaccatgttcgactacattattgaaatagatggcatggacacatttttacaggatatattgtttaattgaagaaaatggaattgctcacacataatttaaaaagcagttctgtttatgagagttccaccccaaaatggctttttaaattaagtgctccaatgtaatttttttccccaggatactccaaggaaatcggatccgttctattactaaaaaagccttcactggtttggatgcattggagcatctgtgagtagctagaatttagttaccctaaaagagaatctctaagatggtttttacttatgtgtcatgaaagataaaacaaactggaatgtaattttgttggcatccttccggttccataaaatatatttaaacatctccctatctttctatttctttctctgtctacctacttacctacctacctatatagaagtatacaggtgtatgctttcctttgtatttaagaacaaaagctatatctccttaatgggtttttaattgtttttctcaaacagtgattatttaattaaaaaaaaaacaaactactaggtgtagttcatccactatatatcaggcattgtaccacatattcacatatattctcatttaattcttagtcagaatacaattcaatagctattattatctttattgttaagcggaggttctaagagtttattgattccactggacagttaaaggagatgacttggcttttaaagaacaaagacaatgttccacaatccttaagagtgacataggagagttttagcactactttgagaattgttggtctcttattgttgtttaattatgaaacatacaacccccccttaccattgttctcttttttgttgttttcttttgtttcgtcttgacccaccagttagtagctgtcagaagcaggacgcaacccagagctgccccgacttgcacagtgtccctgcatcacactagctcttgcctgtacaatctctgccgctactcccagtagctcctagtaactcctggcacacatttctgaaatgtcatttaggggctcaggaattttcagccactaagagaggaaagctagctaacattgataggaatcaaaacttgcatgttttaactaagggaaccaaccagctgcttataaccatggatgtatgttttacgcttgtacagtaaaagtacaaagtaatgtataatatcgactctgactgttaaggaatgcttgtatccagaagttttaatatgtattaaccaggacaaaagaagttacaatttaaaatacatattgggttctcctatgtgtgctgtgtattgagagtgaagatttagctgttatctgtaaaccactgtgttgtcaccttctgactgcaccagttcctctgagggagacttggatcgtgagccacccagacagtgagtgcggcagttcaaattatagtagaatgattctgcaaagctgagttttggaagggcagaccaacattgcagtatttattgaaaccgattattttgaaaagaaaactagccaaaagggtttgtcatttggcccattccgtttctgggaacgtggaattagtggatcagtggagtattaatctctgcttcagttttcttaaatcttccttgattgccccagcctcttcgtctagccatgtctggtcccttctttctttgtcttctcttcccacttgtctcactcaatattccctttgtatactgtgacccctgtaaagaaaaacagagtggtaatcattgtggtgaatactttaatgcagagtgcttataagtctctgtataaagagaattaatccagaatatgtgctcattttatgaatttcctgcctgaagtattggttttaacaagtatatcttgtctgaacatcttactgcgtttatgttagtgagctgtgggtgacagaattaggttaatggttaaaagcacaggttttggaattgaaaataattgtttcaacccttaccttcccctttcgtgctgagctaagtagtaataccatcatattttgggttgttgtaggaataaatgcagtaacacttgtaaatcacttaactgagtgcatatcttcaaaaatactgtgtaaatgttttataaaagcataattatttttattttttatttgtatattttatttgtatatttagaagtttccaatagttgctaatttgaataaagagtaatagaatgaaataatagaacagcatgggccctaatgagtcaaataatctttaagtgatgacagaaagtgaatctttttcactaaaacaaaacctatctgtgatacaaatgccctgggtcttcagcacaagctttgcagtggattcttctggggctgccccagtcatgtatttgacacatagagggagtatttgtttggcaaatggggtgggcagtgggggcccaaactttgtccaaaagcacgaaatgatggtagtttgctctgatgcatttgatttggtgatttttcagagacctgagtgacaacgcaatcatgtctttacaaggcaatgcattttcacaaatgaagaaactgcaacaattgtaagcttttcttttccttctaggagtctgaaagtatagaggggaaaactgtcatatggtgtggcatcctggattatgtatctataaaaagtgcctggcacattcttaacattacttaatttttatactaggcaacagaaaaggagtttatttgttctttttgttgaaatgagtttttctttctattttaaattcgcaactttgtgggaccaaatatagtacagtcacccaatatagtagtaattttttcagttgtaaggaacttttgataaatcaacacttctgtctcagtaggacagtaagaacaacagaaaatcatgctagatacatttcttgtattttaaaatggactgtgggatacttattccatgggatgtgtgtattcagtttccaaattcattgctttgttaatatttacttgggtttagtttacttgtagaaatctgcatttcatacagaacaaattgaatgtaattactctcctcaggcatttaaatacatcaagccttttgtgcgattgccagctaaaatggctcccacagtgggtggcggaaaacaactttcagagctttgtaaatgccagttgtgcccatcctcagctgctaaaaggaagaagcatttttgctgttagcccagatggctttgtgtgtggtgagtataagtattgcccttgccttttatttattcttcttttttccccctcccatttatccaaataatggttttgaatagatttatgatctctttataaagcttttatttctgctgaggtagaggaaaatgggtctatagtttgctgattattttaatttcacagatgggaaagagagttttctaaaattgcttcatctttgttttggcatcaggatggtgcggtggaatgagaatgaaattggatcttgggagaatggaagggtaatctcagcccttctacttaacttaaattccctaaatattagtctctgcatccatgaaatggggactctcctttcttctcttcccaactctgaggcttgttgggaggtttacatgaaagagaaaattattaatgatttatggggtgctaaaaaattaactattggtcggtaaaacatttacaagtaataggaaatgtgaatttattataaataattttaaggtccattgttttagcatccaagaatctcagcattagaaatctagttacctgaactttacatagctagttagtagcagatctggatttaaaagaaaagttttcatctctggtgtaactttctgtctattacatgatgctgccatttactattagctgccatggagacctctgtaaaaataaatatgttttataaaccaataaatcagaatttgcttttatttaagcatgggtgttaaaatattaagaaccttcttttgcattggcatttaaaaatttacttaaaactgctttgtccacgatatatatttttaggttgcagcattaagcagtgccagtagtttctggaaataaaacctctgatgtagcttttggaactgaataagcttttggcattcatctgtaagggcctgaactgctcctttcccatggtccttgtttcatagttttttagtcccaagatctgatccccctattacgttgaaacacatgtatagtatccatcgtttttttcacttccttgtgaatctgaacatcgatttattagatgagaatttcagaatagtacagaaaacacctcgattacaatatgcagacattgaaaaatagcagccctggagttatcaaagcatcccctataacccattcaatacacataaaaagttgtcttttcaaatagtagcacccaaatggtacgctttggtagatctcagatgtttccttctgggtttagatcatggctgagaaactgaagttcaaaaaggtaacttttccaaaatgtaacagagaactaaaaataactgttagaatgaaagagttgcttagctctaattataatgtagctttgacagggcagcgcggcggcacgattggccgctcaaagctccaggctgaagccagtgtcttacagtttgttttacagatgctttttcttttgctatcagctttttttttttttttttttgcctctacctaaattactgtttttaaatagtggttctgttttggtaaatgaagtgttaatggctgtctttgttgattaatcatgattgatgtttgatttcctaattttgctgctcattatctggggagaacatgggaacaattgcagtttctgatagtagcattcaaaaatgatccctgagcctggaagtttttaaactgctttcttcttctacttatagaaagcataagggatcaggaataaagtgtgggttttccgatagctccaaaataacagtcttttctcaggtaatagtgattgataaatagatctgcatctgtattcgagatgaatgagttactttataaatactctcccagtgtatcatttcaacatggggacggctagtccatctggaaaacatacacaaagggtaaaacctaagccactgtttttgcatttcttggtgttcaaatttgagtagtatttggactcttgagccttaacattgttttgtctcctcctctccatttttaacagatgattttcccaaaccccagatcacggttcagccagaaacacagtcggcaataaaaggttccaatttgagtttcatctgctcagctgccagcagcagtgattccccaatgacttttgcttggaaaaaagacaatgaactactgcatgatgctgaaatggaaaattatgcacacctccgggcccaaggtggcgaggtgatggagtataccaccatccttcggctgcgcgaggtggaatttgccagtgaggggaaatatcagtgtgtcatctccaatcactttggttcatcctactctgtcaaagccaagcttacagtaaatagtatgtgatctgacttttcctttagcatttaaagataccttttagaaatagaaagcacctgtttttctctcttaatcttaaccctgtcttttcttctcacagttccccacctgactcttcctttccctacctttcattccacaaaattaagattcttggttatttgtatctaaacctgcaattatgttgaagacgacaccgtactcagtgtggtgagtaacacagagatgaaccagacatgtttttgctcttttttttttctttttcttttttttttttttgagacggaatcttgcactgtcacccaaggctggatgacatcctggttgcaatcttggctcactgcaacctccacctcccagattcaagcaattctcctacctcagcctcctgagtagctgggattacaggcgtgcgccaccatgcccggccaattttttgtatttttagtagagacggggtttcactatattggtcaggctggtctcgaacgcctgaccttgtgatctgcccaccttggcctcacaaagtgctggctgggattacaggtgtgagccaccgtgcccagcaatgttttcctctttgagagtttacagtgtagtatactgatctggaaggctgcaaagcatcatgctggatgcacactgcctttaattcagagatctgtgtgtgaatcctgccactcctgcgtgattttcagcaggttgcttcacttctccgcctccagttccacatctttcaattagggataataggacctgccccctagaggcattatgctcatttagtgaaataatatgtgtaaaggatgtagcaaaatggctacaaggtagtgctcagtaaatgcactgttagccactgttaacagaagtctattcttgtttgctttgtgtggtaggtatacagttttacagtaggatccttgccactttatcatttaactatctgtatctgccgtggtagaagattttgaatatgattcattaatgcattcactcagcaaatgatggctgtggcctggcacatagaacagttttgagtttaaattgtagggcaaaacatgtatcttaaaagtcacagaatgttagagctaccaggagagactttaaaaaaaaaatagatgaagtgagtggtcagggtacaaagagattaattgatacacccaagatctcacagttgattgttgaggaaactaaaaagtggcagaaaatagcaggaagaccttcattctgagaatcagatgacctctgttttatcctgacttcattgtttctgtatctgtaaccttgagcaagccttttaatctttccatctcaactttagtttccttgacttgaaattggaattaacccctgcccaatctatgtcagggacaatctgtaagtatcaaacaaacaaacaaataataaaaaggaatgcaagtgaacctgtaagactccactgtgctaatgcctatattgtttctctgatttcagtgcttccctcattcaccaagacccccatggatctcaccatccgagctggggccatggcacgcttggagtgtgctgctgtggggcacccagccccccagatagcctggcagaaggatgggggcacagacttcccagctgcacgggagagacgcatgcatgtgatgcccgaggatgacgtgttctttatcgtggatgtgaagatagaggacattggggtatacagctgcacagctcagaacagtgcaggaagtatttcagcaaatgcaactctgactgtcctaggtgggtgaatttgttaagattctgtagtataaatcagtcttgaagatactagctcatccaaggtccctaagtatcagaagttgtgagagtaagagatgaagatgtatggggcattgccttttcctagaaagtattaatgcaaatggcctcttgaacactttgaagtcagggattgcatgacatcctcaagtctggccactgaggtgaatccctgccccctccatcctgaagagaggggccgaggaaaagttgggatgctttcccttttatgggggatcaccctcctctaatttccccactgtgctgtctatatcagtagtcttaacaccataaagaacattaaaaaaaaatgtgggaacaaattgggaaggccttactctcttttctcagcctaccatacctctccggaagtcagagtttttttttcatcttttacctaaacaaatgctttttaaaaatgtaaacacaattattattcacgtatctttgaaagagctaattaacgtaacctattaagatactaaataataaaagtaaattattgtcagagttttaatataggcccaggcatccggccctaaaaagtttcacttaaaaaacttaagcattctgattttttttatttatcaacatacccttgtgcttgaaattatttttgtactttctatttttaaaaagcttttgtttcccactctccccccctactaccagcttcccgacttttgcaaaagtgagggaagctgagattttaaaaatagtagatattatccttaactggtgttatgagtaaatgacagcagaatagtgaaatactgaatgttgtatatgtttaggctcttagaaaagtgtgtccagtaagttgtgggagaataaaattttaggttacaatttgaataagtttaaatgctacattttatgatatggaaactaaattttatttgggaaattaaaagcataacttgttatttcagaaacaccatcatttttgcggccactgttggaccgaactgtaaccaagggagaaacagccgtcctacagtgcattgctggaggaagccctccccctaaactgaactggaccaaagatgatagcccattggtggtaaccgagaggcacttttttgcagcaggcaatcagcttctgattattgtggactcagatgtcagtgatgctgggaaatacacatgtgagatgtctaacacccttggcactgagagaggaaacgtgcgcctcagtgtgatccccactccaacctgcgactcccctcagatgacagccccatcgttagacgatgacggatgggccactgtgggtgtcgtgatcatagccgtggtttgctgtgtggtgggcacgtcactcgtgtgggtggtcatcatataccacacaaggcggaggaatgaagattgcagcattaccaacacaggtgtgtaaacagaagcttggcacaggtcaccggagtcatgtgtatttgtggttctgcaaatacttctagaacgtgtgtcttgcagtctgagttcatctcagaagggtgactcatttgtttcaagctgcagaaatatgattcgctaaaaaactccagccccaaataaagctgatgtttaaagattaatactttttgttaaaatgacatcagggtatcctgtggctgtgagataaaatccaagtcactgactaaaatatttctaactccttcataagatagtgatggagaaccaggaacagccctttaatgataaggtttactctctgcagtagttgtatgtcttgttgtctgtgcgtatgtgcatgtacttaggttggattttattagtggaagaggagctgtgacttgattagtatgtgcaaagtcagatattgattagtaatattaagaagggaatatggcaataatcaagcataattcgaaagcttagatactgtcccatgaaaattcttaggccttcagccttttaaaaaatctgtttaaacatttgttgttttgaaatttgggaggtgcatccaatgggtgataaaacagaaagtcagcttatacgtcccagagcagcaaagccctaatttgccgttccagaatactgtacaatcgagatggttttgccagagtagatctcccctaatttgatgtatacagaagccaaaatagtctatgccattcacccgggatgcctgtgggacaattaacgatcatccttggttaataaaatgctgctgttttattacagatgagaccaacttgccagcagatattcctagttatttgtcatctcagggaacgttagctgacaggcaggatgggtacgtgtcttcagaaagtggaagccaccaccagtttgtcacatcttcaggtgctggatttttcttaccacaacatgacagtagtggtaagtgtttaaaatgaatgtgggctgtaattgttttgaagtcatatggtggaaggctcagatatgatattcattttcacaagacattgataacactgacatttaggacctggcccaagatcactagcaaggttgaaattgtatagttctataccgttctcttaaatactaggaaagaaataaatctttgtttctaacaataaaaaaagactagtaggtttagaaaaatgtaattattccatgtgtaaaggatatttgtgtatcctttacattataaatgttctttggcccttaaatgatattaactggttacatgaatgggcttaaaagtctaatggtttacattattttctttaagaagtctattttttatttatttatttttatttatttgagacgaagtctcgctctgtcacccaggctggagtgcagtggcgtggtctcagctcactgcagcctccacctgctgggttcaaacgattctcctgcctcagcctcccaagtaactgggactacagccacatgccaccacgcctggctaatgctttcttttgtttttgtatttttagtagagatggggttttgccatgttggccaggcttgtcttgaactcctgacctcaggtgatctgcctgcctcagcctcccaaagtgctgggattacaggcgtgagccaccgcacccagcctctttgagaagtctaattctgacccttgctttcaatgctgcatagttttgagaataataatggagacagcataatacaagagcacaggtttggtacaagacctactacttactgcatgtactgtggggcacatacaatactttctggtgaggtacttgtgcaaatgaaatgaagatggaaaactacatggcgctaggcacatattaagggctcagcaagtggaagccatcgatgttattctaaaatatatgaccaacttttcccataagtatttattatacgctctgtgccagacattgtagttgggagagaagtatatgttttcaatttcacagtttcgtcagaggtggataaactaaaagtgcttggcaagccagaaataaagagcgtagagttacaggatctgagcatagaagtgagtattctggttagacccgtttagaggcagagtggagacccaagctcattaaagcataatggggttaactgaaaagacacttaaggaaaacctaaagggacagaactggggcataataatgccaggctgcctagatgctgaggctggagatgaggctgctcccagagtagctctgggccaccagcattactgtgtcacgttctgcatatttgcttttctctcagcccaccacctcttgctgcccagtttctgcttcccagacacatgcgtcatcgtgacatctctaaccctgatgatatcatttactcttcacctgctgtgtccagcagtaaatggcgtatatttctgtgttgtttggttcagatactcatgagatgatatgtttagctgagcttatctttgagatgggcattaagaggtcattggccaagtgccaatcctggttctggtcatctgggaccttttgtaagaaggggacagtgctgatggtatgtggtttagaccatggctgctttggctgcaggatctgcacatatcagtttcccgtagaaaccaagtgagcaataaggccaccacacctagcacaatggctaattaagtcctctaataaattttttaaaaccctactgtaaatttttgcaatttttttgtctatatgatgttctagtcaaactttcatctataaatatggaagatgccaaaactggggagaatgttgaatggcacttgaataattggatcattgactaagatttttgtttcaaagggacctgccatattgacaatagcagtgaagctgatgtggaagctgccacagatctgttcctttgtccgtttttgggatccacaggccctatgtatttgaagggaaatgtgtatggctcagatccttttgaaacatatcatacaggtaggtggttttcttgcttgagtacagttctgtttcttagagagacttctagatgtgctaactgtaatctccttctgttactgcccccatattaaaaaggttgcagtcctgacccaagaacagttttaatggaccactatgagcccagttacataaagaaaaaggagtgctacccatgttctcatccttcagaagaatcctgcgaacggagcttcagtaatatatcgtggccttcacatgtgaggaagctacttaacactagttactctcacaatgaaggacctggaatgaaaaatctgtgtctaaacaagtcctctttagattttagtgcaaatccagagccagcgtcggttgcctcgagtaattctttcatgggtaagtttattaagttatcaggtacctcgtctgaggatccatactccaagttgtgtgtgagagagcaatgacagccttgaatgtcaaactggtaaaaaatggtttcttgaatgaggctgccatgacatccgactagttagtgtaaatgcctccaaaagcaaagtcagaggtgggattttacttgatgatgtgtttaatctataactaagcctcaggagctttctgggtagcactgtgtgtggcatctactccaagacaagggtttggggaggacttaggagctcagcttgtcagccatgtggaaaaagtggttttgggctcccacggcctttggggtggagttgtgtgctctgcatgattgtggtttggtatgtctggtggcttccaactgaacccgcagtcgaagggtggaaaacaacatcctacctagcaacaactgctagtctgacaagctggactacctttggccaagaaaaccagccttaaggtccaagtcggtggtgttagatgctggctggcactgagattaggtagtgaattttttcgtctgatgcatggggataataggatggaagagctgaggtcatcttttcactgaacagagagatggaaaaatcagccacaacttgccatgttgacaataaaatttaaaaaaggagaattttcaaatattttacccaacttctacgaaatgttatgttttatcacagtgtaattatttatattccttttttggaaaaaattaaaataatatgctttgtataactgaggcaagaatttgattcaattgagtaatatttggctacaattaatgaagaaagggcaggacacaggtttattttgaaagaaaatttctttatttagcctcagttaacttggatgttaccatccaacacacccgtcaccaaaattgggctctcagctaggatgtggggaaacttatattggggaactttattgcatgaccattaacattactacaggtcatgagaaatgataaagaatagatgcatttgttcagtggatgtaaatatgagggaaggcaaatgtcttttgctccattctagaagtgatctggctgtaagacagatgtacatgtatgtgagtgccataatgtggacttgtagaaaacacttactcatattcatggggtaagatgttccttcatttgcaatgggttttattgattcacatgctagcaaagggacccatgtgctcaaggtgtttctttctttcaggtacctttggaaaagctctcaggagacctcacctagatgcctattcaagctttggacagccatcagattgtcagccaagagccttttatttgaaagctcattcttccccagacttggactctgggtcagaggaagatgggaaagaaaggacagattttcaggaagaaaatcacatttgtacctttaaacagactttagaaaactacaggactccaaattttcagtcttatgacttggacacatagactgaatgagaccaaaggaaaagcttaacatactacctcaagtgaacttttatttaaaagagagagaatcttatgttttttaaatggagttatgaattttaaaaggataaaaatgctttatttatacagatgaaccaaaattacaaaaagttatgaaaatttttatactgggaatgatgctcatataagaatacctttttaaactattttttaactttgttttatgcaaaaaagtatcttacgtaaattaatgatataaatcatgattattttatgtatttttataatgccagatttctttttatggaaaatgagttactaaagcattttaaataatacctgccttgtaccattttttaaatagaagttacttcattatattttgcacattatatttaataaaatgtgtcaatttga

SEQ ID NO: 20 - protein, 1119 aa, Homo sapiens
MSAPSLRARAAGLGLLLCAVLGRAGRSDSGGRGELGQPSGVAAERPCPTTCRCLGDLLDCSRKRLARLPEPLPSWVARLDLSHNRLSFIKASSMSHLQSLREVKLNNNELETIPNLGPVSANITLLSLAGNRIVEILPEHLKEFQSLETLDLSSNNISELQTAFPALQLKYLYLNSNRVTSMEPGYFDNLANTLLVLKLNRNRISAIPPKMFKLPQLQHLELNRNKIKNVDGLTFQGLGALKSLKMQRNGVTKLMDGAFWGLSNMEILQLDHNNLTEITKGWLYGLLMLQELHLSQNAINRISPDAWEFCQKLSELDLTFNHLSRLDDSSFLGLSLLNTLHIGNNRVSYIADCAFRGLSSLKTLDLKNNEISWTIEDMNGAFSGLDKLRRLILQGNRIRSITKKAFTGLDALEHLDLSDNAIMSLQGNAFSQMKKLQQLHLNTSSLLCDCQLKWLPQWVAENNFQSFVNASCAHPQLLKGRSIFAVSPDGFVCDDFPKPQITVQPETQSAIKGSNLSFICSAASSSDSPMTFAWKKDNELLHDAEMENYAHLRAQGGEVMEYTTILRLREVEFASEGKYQCVISNHFGSSYSVKAKLTVNMLPSFTKTPMDLTIRAGAMARLECAAVGHPAPQIAWQKDGGTDFPAARERRMHVMPEDDVFFIVDVKIEDIGVYSCTAQNSAGSISANATLTVLETPSFLRPLLDRTVTKGETAVLQCIAGGSPPPKLNWTKDDSPLVVTERHFFAAGNQLLIIVDSDVSDAGKYTCEMSNTLGTERGNVRLSVIPTPTCDSPQMTAPSLDDDGWATVGVVIIAVVCCVVGTSLVWVVIIYHTRRRNEDCSITNTDETNLPADIPSYLSSQGTLADRQDGYVSSESGSHHQFVTSSGAGFFLPQHDSSGTCHIDNSSEADVEAATDLFLCPFLGSTGPMYLKGNVYGSDPFETYHTGCSPDPRTVLMDHYEPSYIKKKECYPCSHPSEESCERSFSNISWPSHVRKLLNTSYSHNEGPGMKNLCLNKSSLDFSANPEPASVASSNSFMGTFGKALRRPHLDAYSSFGQPSDCQPRAFYLKAHSSPDLDSGSEEDGKERTDFQEENHICTFKQTLENYRTPNFQSYDLDT

SEQ ID NO: 21 - DNA, 292920 bp, Homo sapiens
  CDS (56)..(184)
  CDS (130856)..(130972)
  CDS (156150)..(156239)
  CDS (160488)..(160570)
  CDS (163036)..(163105)
  CDS (164261)..(164356)
  CDS (165319)..(165453)
  CDS (170904)..(171078)
  CDS (172012)..(172079)
  CDS (181701)..(181775)
  CDS (183295)..(183435)
  CDS (183916)..(184119)
  CDS (184507)..(184629)
  CDS (188146)..(188228)
  CDS (188797)..(188919)
  CDS (197696)..(197775)
  CDS (197860)..(198047)
  CDS (198184)..(198249)
  CDS (199783)..(199875)
  CDS (200576)..(200699)
  CDS (201315)..(201436)
  CDS (202508)..(202594)
  CDS (203276)..(203365)
  CDS (204400)..(204515)
  CDS (204780)..(204849)
  CDS (205735)..(205860)
  CDS (206438)..(206509)
  CDS (218030)..(218176)
  CDS (218396)..(218479)
  CDS (218871)..(218982)
  CDS (222859)..(223037)
  CDS (223275)..(223388)
  CDS (225885)..(226002)
  CDS (230376)..(230509)
  CDS (232885)..(232999)
  CDS (236294)..(236360)
  CDS (237768)..(237815)
  CDS (240416)..(240483)
  CDS (248798)..(248913)
  CDS (254621)..(254758)
  CDS (254877)..(255059)
  CDS (256651)..(256764)
  CDS (256885)..(257100)
  CDS (259520)..(259577)
  CDS (260467)..(260535)
  CDS (261903)..(262009)
  CDS (276116)..(276238)
  CDS (276942)..(277055)
  CDS (277279)..(277284)
  CDS (277732)..(277767)
  CDS (278600)..(278746)
  CDS (281198)..(281408)
  CDS (285929)..(286119)
  CDS (288918)..(289018)
  CDS (289154)..(289292)
  CDS (290194)..(290199)
gcggccgggccgggccgcgggagcaggcggaggcggaggcggcgggggcaggaggatgtcgcagccgccgctgctccccgcctcggcggagactcggaagttcacccgggcgctgagtaagccgggcacggcggccgagctgcggcagagcgtgtctgaggtggtgcgcggctccgtgctcctggtgagtgcgggacgaccgcgggccgggggaggatggcgggggcgcaggcagctgcgggccccgggccgggcgcctcttagtcggcagggctgaggcagagcggccgaccctgctgggtccgcggaatcaagaggtggggccggcgggagggagttggacaggggagaagagaaggtcctggaggggctgcaactcccagacccctccccgccacccaagatcctgtccccatcgctgtccccttcctcctgggaaatttccgcagagtgatgtcgccctgtcactcttttcaccccgctctctcccaatttacctgctttctgtcaactgggaaattacactctcccccctcccccgcatccctcccccgtatccctcccccggcctccctctccttccatgttttggaggggcgcaggggaattgaggtgggggcttcctcatccagtctgcgctcagggtgggagatgcccctgctaaccctttgagttggctgaactccaggagggaaggacttcggcatcctctcctgcgccccccacctccaagccggtatcctgaagtttggccgccttttaggaaggcttggggggcatgatgggaaccctcgctaatttagtattggtgcaaattcctgtgacgtttgggggttctaagtaagcaaagccatcagcccaaaacgaatcttcccgtggcagaacgtctttagagaataggcctctgggtgtgaggaagatgaagttttcgattaactttttcacagccagcgccggtcctgctgtatttggaaacgcactacaacccgattcacctggatggtgcgggagtggagcgacgtttgagcaggagcgagctctgcagggcagctggaaacttttagcagctccttgcgttgccgccggcatttgttttcttgaaacgggcttgtttgtgggtgggtgtgacttgtgtttgttggaacagtgcaagaagatgggccttggaagtggttgtctgggccctgtgggggattgtcggggcagagtgccgggccccttaacacaggggcggatgcatcattttggtggcagatcgatgcccttcctgggcagacacagaattgcgtgaatgacgtttgtggagattggagatgaagcttcgctgatttctatatccagtttgctcagtttgaattttctctcgattgctagctctgccaactccaaatttctccaactccagtttgatccatagtaaacaaggatttaatttttctattttagggaagtcgattaggtaaggagtagagcaggagttgggaatagaccagaacctggccatctcttccataaccagctaacttctgtgtggcttcctgcatcttcctgagttttgccagtgcatgttaaggataaagcctgcaacttctttggcatcttttctgttctcacacagaagttggttcctttatctggggcctgccgtggtcatcagggatttgaggcagaagaagagtaaataaagtgtaccagtgtgccatgatttccaaagtgctgcaggtactggtttaataagccgtgtagatggagcccaggagtgctggtgcagacacaacactgctgatgtgcagtagtccccgaatatctgcccttcccatcggaggatggcctactaatggtgacctaggagtgtccattcccacgtgtgacaggctgccaactgtgttatctcatgatactttagtagtacatccgttttccctggacacccttaagcatgaagagccagatgcccggctgttgtcttaactcttagtctcgtctgtctgtggtcacttgtctgatgaaacctgtgatggaacagatacaaaatgcagggaagcaggtgggcctgctctggcatgtgagggcccctggctgaatgggaaataggaaatgcattgtgatggttctgaattgcagaaggaagaatctgggagggcttacagatactgaaaattacccacacacctcatccccccacctccttcctggtactctgccactgcttacttcctctagtggctccagtgtctgccagggagccacagcaggtgcacctgccacataagttctggccgggctttgttgtatgaaggtctaagaggtgaggtaaggtaaccctggacttctcaggaggcagagcagcaaccacgccaggttcagaatcccatggtctgtgcatctgtccttagatggaaataattactctgtgtctgataacttgggtcagcactaatacaatgcccacaacataaatgctcaataaatattcttatctagctaataaagcagttctgcagatggatttaaaaaaaattaaactatgtgtgggtttagtagctcttcccacacttcaagtattgatgagtggatggtcatgagatcagaaacaacaaaatgaaatagttcagtggatgataaaggctgccattaaaaacaagctttaaaatgtaaacataatgtgggcttatccatttttcattgttcaatagcttcatttttcatgtgttcaggttcatggactttcatgaatgattttgtattaatttgtttgaaaagcttgaaaataagcatacaaaaagtagagagaatagtataatgaaccttcatatttcatcatccagattgaataattattgagattttgccaaacctgcttcatatgtctcttcttcctattatttttcatgtgtgattgtgagtcccaggccttatatcatttcacctctatataactagtatatgttacttaaaaatagggtctattcttacataactgtgtcataataaaattaacaacttgttagtatgctcttcacatttcccagattatattaaaaaatatttgattgttagtttgttctaataaggacctaaaaaagctttgtaggccttgtcaaacatggttagctctttcatgagccttagaattctttttttttttttctgagatggagtcttgttctgtcacccaggctggagtgcagtggcgtgatctcggctcactgcaacctccgcctcccagattcaggtgattctctggcctcagcctccggagtagctgggattacaggtgtgttctaccatgcccagctgatttttgtgtttttagtagagatgaggtttcatcatgttggctaggctggtctcaaactcctgagctcaggtgatctgcctgcctcggcctcccaaagtgctgggattacaggcgtgaaccaccacacccagacagaattctttataatggagagaaccctccatggggtcaggacttctgggttttaatcttagaggtttagtagtttagagcatgggttgtaaacctggttttatgcctcaccagctgtacaatcttaggtatataacttaaccttgttggggctcagtttcttcatctgtagattggagataataattatgctttccttgtattgttgttggaaggattaattgagctatgtgggtgaagctcttaggcagtggctggcgtatattctaccagctacttaagtccccttggactgttgcttaatgtctctgaacttcaaggttcctgctctgttaaataagaggcatactcggtttttctagagtcccttattccaccaatgggcttctatttgaagctgtttttttttatttatttatttatttatttatttatttattattattatttttttgagatggagtcttgctcttttcacccaggctggagtgcagtggcatgatcttggctcactgcaacctccgcttcccgggttcaagtggttctcctgcctcagcctcctgagtagctgagattataggcgcccaccaccacacccggctaattttttgtatttttagtagagacggggttttgccaatttggccaggctggttttgaactcctcacctcaggtgatccgcccacctcggcctcccaaagtgctaggattacaggggtgagccactgcgcccggccttatttattattcttttagagaccatcttaatctgtcacccaggctggagtgtagtggcatgatcatggcttgctgcagcctttgaactcccgggtacaagcaatcctcttacctcagcctccagagtagctgggattacaggcatgcaccaccacgcctagctaatttttgtatttttttttagagatggggttttgccctgttgcctaggctggtcttgaactgggctcaagcaatcccaaactcctgggattacaggtgcgagccagcatacccagccctaagctgcttttataaaagtagtggaggtgctactaggaacatttttaactgtaggaaaagtaatttataatgtttggtaatgaaggaagaatcctcacaatttcagaattagctttccataatttagaatagtcaggaaggtagcatgttcaaaacgtacgcgaactcagaagaaaagctagaaagaattccctgagcagggttgagttatgattacttttagagctcctgaaaggattttacctcaggtctttcagatgtattaaagatggcatcataatgacctagatctaagaggatgtattaataccactcaaagcctacaagtgtcctttctctgaaagatttgtgtgaatatcaggtcacatccctttgcatgggcatgctgactgtcctgcacttgggtattaatatacaagtcttctggctgcccggcttccttactgatcttatctcactatgttcaacttcaaactcttcttcgatgtcaagcacttgccagtgatgccactcctcacccctttgaattccaacaatacaaatgaaaccaagtcaggtcgttgctaaatttcgcttggtattactgaaggagggcagacagaaggtatgggatggtagtgtccctgagtctgcctgaggcttccctcactgccccgtttattcagctcaagattccagtgctgtcggaggtaacgtgagaccccggtaatggtgttctttgaaattctcaagtaaggtaaaatctcgtttttggctataatttaaaatcagatgtcagtaagctgataactgaactggccagggcttctctgcactgtttttctccaccctccagtggagaaaacagaaatgtcccaaaatatcggaagcagggtggaggcccatcttggactatatcattaacagcaggttccattcctttggcttctagtccttttgattattagtacactgtcaggaggacattagtgaggccttgagtttgaacagggagggaaggaactgtgaaatcactgtccacatttactgagggccgaccctggggcagggctccctgctgggtgctaagaacatgataccatgtcagagtaggcccttgcccgtgtagggtttatgatctaaacaggtggacgggtcagtcacctactctaaggtgactaacagtactaaggcacaccatggaaagagtcaaacgtggttcagtgaccagaggaagatgaaagcacagaaccagtgtattcgggaaagaatttattaagaattaaactggacctggaagatgcagagataaggaagacttttatcctttttttctaggaaagaataagaaattgagcaaatgcttagtatgctcaggtaggaccaagaaggagcagagcggcttgggcaaagaagagcaagtttttggaggaagggagagaggttttgagaaattacagttgccaactttgggaacaatttcattgattggctgagaacacatcctgaaatagattttttttcctttgtctttttgaaactatttcaggaaagaagttcaaaccagccatgaacatatgcttcctagagagaccttccctaagtgtaatcctgagagtaaataatgtgactgttttctgtcaggcaggcccaagaatgggatgggaggtgtgacgtggaagggaaaatccagtaacaggcctgtgtgtgtgtaggcacttaggtatcatgagagcagtagtcggatatggtgagttaccattcagtaaatggtgttacaaataataatgttggagccctaccttacagaacatactgaaataaattatagtgaaatataagagttatttgtaaaataaaagaaaccacataaaacatggggaaataatcatgtaagactggagagggatatttatgtatttatttatttatctgagatggagtctcactctgtcacccaggctggagtgcagtggtgcaatcttggctcactgcaacctctgccttccgggctcaagtgattctcctgcttcagcctcccaggtagctggaattacaggcgtgtgccaccacacccggctaatttttgtaattttagtagagacggggtttcaccatgttggccaggctggtcttgaactcctgacctcaaatgattcacccacttcggcatcccaaagtgcagggattacaggcatgagccaccacgcccggcctggagagggatttttgaagtatgaaatttcaggaagaaaccagttggacctgggctttggaggtgagccttggctttgccactgattggctgaggacttcgagcaacatacgttgcccgagtctcagtttgctcatctgagtattgggattggtaggtattatcttacagagttttttaaaagtaaagattaagtaagataatgcatgtgaagtagttaatagtgagtgcttagcaaatgcaagctcttattatgttactaaaggagaagattgattatcttgactaaatatttctggagccagcatttattgaccacctatgatgccctagaatgcatctgaaggcttcacacacaggttacgttacctcgaggtcacaggtgtaggtatgggggctgagtcttgaagcttggcactgtaacttcacaccctgagctcctagccactctgcctgttgcctccccatgttaacactaaatgtctgtctctgtaagtaccatacaaaagtcaaacagtaagcttagaaacaatatttgccctgtagctatttgtctatagagatctcttggtcatagtgttaagttaaactttttgcttggagggctaccccattctgcaactccacggccgcattcacatggacataagctgtactgtacagtatggaatgtaggtttgataagaatgaggttttaaaagtgtacctgtcataaaattatttttctttagcataaatctcttatatacattcgttgactggctatcggcctgacctatctgtgtttagtctttaacataaaccagaatgcagaatgttaacagtggttctctggatgtggggtgatgggaagttcacttttttttcttccgattttctgtccttcccagatttctacagttgacatgtattacttttatcactttggtcaatattgacaggaaaatgatttgagaatgtgctgtgataattggagccctcagagcgaagccacttactcctgagagatagttctttttcttcctgttgtatatttgagcttctgcaattttaaaaagttgctcagaacttagcaagtggtggagagaggagggctgggagtttctgagatgccggaggctatctgtcacaggctctgcccttggctattccctggcctggggcttcttggctctactgacccagctcttatctttacttctacactggctggtctgcctctgcttcctcaccatccacagctccctatccctgtgacctgctcatgtccttagtgtggggcggcctctcagggctcaccccatacgactaagcaccctcttccgttctgtggaacaggattctcctgcatctcctcctccttctctgatgtctgttcctttatcttcttcactctttttgttgtagtcaccacaaaggggcattcctaaagggtctcttctccaccactggtttatagaatttaattgtttcccttcactccgaaggggggcaccacctctttgcaatttccacagttttatctcagttctgattctccccgcttctaccgcatgttgtgccccgccctagacctgcttttctgttttcctgcctgactcttctacttggctgtcctaccagctccttaagttcagcatctatgaaacataaattgccacttttcatcccaagttaggttgtcctttttacattcttgttttagtggggagtgtcatttcatcaccaactatgaaatctgtaactcctcctgtgtctcttctgtttatctcctttgccttcctcattcaagaaccactacattcgttactttctgtcatgaatcagtcgttatgggccaaggactcccagatctcagtggcttagaacagaaaggtttatttcttccacacgctacctctccattgagtgtgggctgggagcctagttccatattgtcctgggacctcagttgatgggacagcccccatcttgaatgtggcaggtctgtgtggcaaaagcaaatcacatggcagcaccgaactccaggagcagggaagtacagtcctttctatgtgtctgcaaggaggactcacatctttggtgagcagcactgatgcctgctgcaacctggcatcccctttcctgtctcctttctttcctggtctgtgcagtagtagggtgtattagtccatttttgcactgcaataaaggcatacctgagattgggtaatttataaagaaaagaggtttaattggcttatggttctgcaggctgtacaggtttctgcttctggagaggcctcaggaaacttacaatcatggcagaaggtgaaggggaaacaggcacatctccacatggctggcaagaaaagggaagagcaaagggagaggtgctacacacttttaaacaaccagatctcatgagaactctatcatgagaacagtaagggggaagtctgcccccatgattcagtcgccttccaccaggcccctcctccaacactggggatttgggtggggacacagagccaaaccatatcataggggataggatccttcttatctggtttctttgctaccgtaattaatccatccttataggttcaattctaaaccctgaagacattagtatttcccattgcccttgggatacaaactatttcccttggaccataaggctctctccttatcagacaccaccctcccatgtatgccagcctctctcatactccaggaggtaaaaagctctcacttctgcctggaataatcatgacccctggccacccctctcagttgccaggccactctctctggcctttgaaactgtactcgcatgtcctggcctatccacccaaactaaagcatgcactgcctgttcctttcctttgaccacttatcacaatttatttatttatttatttttgtacatttgcttaatgtctttttccctccctggactgttggttcaccgtggttttcgcagggcctggtgcatagcaggggctcagtcatattttttggatgaatgaacaaaccctgaagatgctacatctgactctatatcttcattttatccttttcgtatttcctattacctctaatttctcttccctgcacccatttctatttatttcatcccagtttacctcctgctgccagattaattttcctaatgcacaggctctatcatatcatgagtttctcattgctacatatgactaatttgccaatatttttgcacatcagaatgtgtatcactttgaggctggttctgtgtttgttttagtttaggaaaagctgttcagattgtctgtaaatccgtatggggatctttgcataggattttaaagcagccacacatcttgtacaaaatgtataagattaattttctatgttaggaccatttgttttcaccaattccatagagctccaatgtgtaaaagaagacactgatctaactcttgtgttaaatatttagtaactcatttatctggaagaaagcaaaacaaaacaaaaatacaaggaataaaaatcactgggagtgcttttcattcactgaataatgagttttgcaaggagcacgtggatggtgacattatatcttttacatctttattttctgtttcttttttgactccttatcagtgaatttatcttattttatacttttactttctatttctttcttgactctttgttggtgaattggtagcaagagacttactgtctgatcagaactttgaatcttcctgcctctctttctttgaggttgacagggataaagataattaagatagcgcttgggtgtgatgacactggaagacaggctgggtcagggcctgtagtagagacttcccccctctattgaatgttaatctgaaagtgaatctgaaagcagatggtcatgaactacccagggtctccattaagcccatgaagtttattttaaaactcttaaaatagattgagattcaaattgagattcatgtctattttttaaacattgtgtcttaacaaagtagatgttcagtcatacagttaggcaaatgttctaaggaaagatgtttaccatgctaagttaaaaaaaaaaaaaagttataaatagtgccattgtctgggtgcagtggctaacacctgtaatcacagcactttgggaggctgaggtggggcaatgcttgagcccaggagtttcagaccagcctgggcaacaaagtgagaacccatctctaaaaaaaagaaaaaaaggaaagaaaaaattagctgggcttggtggcacacacctgtagtccctagctactcaggaggctgagatggcaggattgcttaagtccaggaagtcatggctgcagtgagctctgattgagccactgcactctagcctgggtgaaagtgagactgtctcaaaaaaaaaaaaaaaaaaagtactacagctgacctttgaacaacatgggtttgaactccacaggtccacttatatgcagattaaaaaaataagtgtattgtaaacatttttggagatgtgcaacaatttgaaaaaactcacagatgaactgcatagccgttgaagaaattaagaaaaaggtatgtcattaatatataaaataatgtgtagatactagtctattttatcatttactactgtaaatgatacacaaatctattataaaaagttaaaatttatcaaaacttacccacacaaacacagaccatacatggtgccatttacagtccagagaaacaaatgtaaagatgcaacattaaatcataactacataaaattaactacagtacatattgtactactgtaatgatttcatagccacctcctgtagcttttgtggtgagtgttgtgttgtgaatatccacttaaaacaccgtgtgacaccaatcatccctatgtgagcagttcctctttccagtgctgacccaaaaagaagaagaggaggcaaaatttaacgtaagtagagagtttatttgggccaagcttgctgcaactcaggagcaaaggttcaaattgccctgaatatacactctgattaacaggagttacaagtggatttttaaaggaaaagaagaggcagtttctgagttgtttaccaagaattcacatgaaaacaacatgggctattgattggctcatctgttgttctttgtatcacacattctgggaacatgaagataatgggggaggcagctagtcaggaaccaaatgactttaaacagttgccgctgggcacggagtggggcgacccgaagtctcatattcatgtctcttctctgggcctgcatagttcacatagctcagactgctccgagctgtttttcttttctctctagtaaattgcttattgcggtaaaaagtgatctcttgccttcttgtatatgatgttcagtgtaataccatagacattgaataacaccattggacccttacaaagtgtcagcccttacaaagatcctggaagcgctcctaggaaacagagagaagtcatgacattacaagaaatagttgaattacttgatatgttttgtagactgtgttctgcagctgcagttgcctgccattttaagataaatgaatccagtttaaggaccattgtgaaaaaagaaaaggaaatttgtgagctgttgagctgtagctgcgtcagcaggcataaaaaccttgcacttcttgcaaaacacctttttatcttgtagtgaaaatgcagcttttatgtgggcacaggattgctatagaaaggaatacctatagaccgatgagttgagaaaaggtgaagtcattatatgacaacttaaagcaaaaggaatgtgaaggatctgaagctggagaatctaatgccagcaaaggatggtttgataattctagaaagagttttggctttaaaaatatcaagataacaggagaagcagttctgtcaaccaagaggcagcatacaagctcccagatgtcgttaagaaagtcattgaggagaaaggatatctgcccgaacagggttttaatacagattaaagtccctattctggaaaaaatgccacaaaggacattttttagtaaggaagaaaagtgaacaccaggattgaaggcaggaagggttaggccaactctactgttttgtgcaaatgcaatcaggtttatgatcaggactgcccttttctataaagctgccaaccccctagccttaaagggaaaagatcaatgccagctgccagtctgttcattgtataagaagacctggtcaaggagaaccctttttctggattggttttgttaccagccatgggttcttgggccctcaatgcaatagaaatcgacccgaggccgaaagaaaagccttcattggagcttatgcctgagcataagggaggaagcatgaaagagagagagagagaggagagagagagagaggagagagagaaaagaagaagaagagaggagagaaagaagagagagaagagagagagagagagaatgaatgagaatgagagaattccttagctgactctctgagcctgtagggattttctattaggcaaagcatgggaattgacatcaggggtaggatatgcagggtgggctgggcaaagcacgtggtagggtatgcgggtcagaatatctggttgcgatggttatcttgagtgatgggccacatggtggtctggccggtggcaacaaggctataaatcagttggtcagcattccttcctgaggtgagacactctgcaaccttggttccatattttggatctcctatggccaattcctggaattcttttttctttttttgagacagggtctgtcacccaggctggagtgcagtggtgtgattttggctcactgaagccttgacctcccgggctcaagcaatcctcccatcttcagccttgcaagtagctgggactataagtgtgtgccatgatgcctggctcaattttgtattttttgtagagatggagttttgccatgttgcccaggctagtctcaaattcgagttcaagtgatcttcctgcctcggcgtcccaagtgccaggattacatatgtgtaccaccatgcctggcccctggaattctttaagtaaaaggcatggttaaacattctgagaacacagaagaacaatttagaatgggtgttttctttatctgactaaagcctcagggttagtgggtatagatagcatcagcgaggtagtggtatggggttttgtgatcactggggatgcatgaaagaatgctctggttggggtgagctgatgctaaaccccatctttagtttccctcagtttcatcagtgctttgtccccgaagtcaggaagtaccttgcaaacaagagagtgccttttaaagttcttttgatattatacaatgctcctggccacccagaacacatgagttcaacaccaaagacaatgaagtggtctacttgttcccaaacacaatgtcctacttcaccctctaaatcaggggccataaggacctttaaggctcaatgcacactgtactttatggaagggaccgtagcgctgtggaagacaacccaaatagaacatcatgaaagtctggaaggagtgtatcattgaaggataccgtcattgttatacaaaaagcagtgaaagccatcaagtctgaaacatttctgctggagaaaactgtgtccagatgttgtgcatgacttcacaggatttatgacagagccaatcaaggaaaccgtgaaagagattgtggatatagcaaaaaaggtggggctggggtgaagggtttcaagataaagaccttggagaaattcaagcgctaatagacaccacaccagagcaattaacagaagaggtctcatggaaactagtgcttcagaactaatgccccatgatgaggaagaagacgtagaagaagaggcactgccagaaaagaagttgacgtcagacagtctggcagaagcatgctaattattcaagagtgcttttgacttcttttatggcatggatccctttaagatacgggcactgaaactaaagcgaatggtggaaggattggtactatatagaaacatttttagagaaattaaaaaactaaaaagcgagccagaaattatgtatttcagtacagttacacctagtgttcctgcttctcttgcctcctgtcccacaccctccacctctactgcctctgctacccctgagacagcaagaccagtccctcctcatcctcttccttagcctactcactatgaagacgatgaagacctttatgatgatccacttccatttaacaagtagtaagtatattttctcttccttatgattaataatgttttctctagcatacttgattgtaagaatagagtgtaatagcagggcacagtgactcacgcctgtaattgcagcactttggaaggccaaggtagatggatggattgagaccaggagttcaaggccagcctgggcaacatggcaaaaaaaaaaaaaaaaaaaaaaaaaagccaggcatggtggcaagcacctgtagttccagctacttggaaggctgaagtgggaggatggcttgagcctgggaggttgaggctgcagtgagctgtgttcacaccactgcactccagcctgagcaaaagagcaagaccctgtgtcaaaaaacaaaaaaaccagtataatatatatcacatacaaattgtgtgttgtttatcagtaaggcttccagtcaactgtaggctattagccagtttctggggagtcaaaagttataggtggatttttgactgtgcagggggttggtagctctagctcctgcgttgttcaagagttaactgtaatatacagaactatttacttttttatgaaaaaaataagcaatattttgttcacggaaaaaagtttatgatcttacagattctaaagtaagccattctcttttgtttcaagaataagttaaatatcaaatgtttattccctcagttctaaacatagaaatgcagttgtataaccaagtttctgttactagggggatagttcttgccatggatggcagtaggatatagtgcatgagaacttgggttcaggaggcttcagccccagctcttcatctactagttctgccttctcagtttcttcacccagagagtggacattttaatagcacttaccccatagatctttgtacttaagcgagcaattgcatataaagcacttagaatggggcctggcacacagtaaatactcactaagtgcaagctgtggttatttatgggggcaagctaaagaaataccatataaccctttaaagtgctgcttgcggagaatttataacacaggaaaattacaatgttgagcaaaaaaaacgcagtaagcagaaatgcgtgtggtcacaattgtgtgaaaacatgtttaagaaaaatattggaaggaaacacatgaaaagataggaatatgatttgttttttatatattctaggatttcccagctgtttaagtgaataggtaataatctattaagaaaaagcaaatacattgaatattggaaggaaagtttgtactacatgtaagatgttcaaatcggtatgcttgaaaattacacttgtatatcttagtgcttgtacacatgggcattgtgatgtaaaatatgttcctgaagtgagggcacacacatgcatgttggaagcaaaaatattgtcaacagttaagagccctgcattaaatgctcatagaggcgggatgcccctgtgaaacaatgcaactttgcatttgactgtttataaagttctttaaagaaaaaaaaagtctatctttggcctctggaaaatctggtcagatagacagggatagttttattatttctgtttcttgatgaggaattaaagaccagagaaatcaagtgacttgcttaattaaggtcacctggctaaccttaacccttttcctggcaagatggcagagattgtctaaaagtgtcaaaacattttaagatatcattttgaagttggagtttcttgaaaacttttaagcgattaacttgaatcattaaacatattttttggaaagtaccactaattctctaggtttatagaaatgcgtgacatgaaagtgaaatattcttttggagatgaaagtcatctttggtggtcatctggtccagcttcctaattttgcagatgaggaagatgagatcagccatggataaacctttgtggtctacagctagttataaagacaagaacaaaatcgagtttgccaactcctggtccagtgaattttccagtgactatagaaaataattacattactttgtttacacttgtgtgttgtcaagtgtcattggtaatcagataataggagactatgaaacatctatttgcaccatggatctcctccgtgcttgtatatttcattagtcccaagctagtttgttggtgaaattgatattcatgtttctacaagccaagaaaggagttctgcatttctgtttaaggggtattaggatgaaagggagaaagaaataaaaagcaaaacttagaaaattaatctaaaaaaggtctcagtagtaacttattcatgaaggaagaactaatttagtagtcaatgttattgaagggacagaatatcacagttttacacgtacattggttaaaattatgatgtggcttgagaaaaaacctccctaggcctattaacctaaaatttgttagtgtagaataagctctgttaatctaggtcattttacatttcaggctgctttgcgttggctaaaataaatattcagctgtaaatgacaatttggttcaaactgtattattatagaaagagttgcatttctaagattgtttagaggacttatttaatctgtcactctaacatattgctgttttcttaagtagaaagcagagttcctatggtgatagcagaggtgccataatatttatagtatagtaggttcatctgtaaactattatactagctagaatttacaggatatttaatctcttaggttaactttttccttcccaggcttttactgtgttcattttgccatttttattttccttcgctattcttataagaatcttctatgttatttttttcctaaaagatcgaaagtaactgctgttaaatgattttttttttttaaactgaaggatgtatgtgcttaactaatttctgtggagttcgtgaaaaactgattgaggtattagggttttttgtttgtttgtttgttttgagatggagtctcgctttgtcgcccaggctggagtgcagggcgcgatctgggctcactgcaggctccgcctcctgggttcaagtgattctgcttcagcctccccagtacctgggattacaggcgcccaccactgtgcccagctaattttctgtatttttagtagagatggggttatctccatgttggccaggctggtttcaaacttctgacctcaggtgatctgccacctggggctcccaaagtgctggtattacaagcatgagccactgcgcccggccagggtattaggtttttaaagagactttcttagttctccactgaaaactcagagaggcggagattcctgacagtgttggtttctcctcgaagttactaaacacattggtgttgagatttccttcatgtgtaagaggtggcatgagagaaaagggatcaccaatagcagatgagggtttcttgaattgaggatagtcacagttggtgattccatatcctggtctagagtatcaatgctggggcaggaggtggggggttgaagattatgggctgtggagaaccacatgtggggtactggggatcggttctttctgtaggcttagggaactctatttgatgggggagagtttcagaatagctcccagaatttgggggaactacagatgttttttccatggcttcagttgttagacatttaaaaaaaaaaaaaaaagcttctgtccttacaatgtggaatcttggcatcttggatatcctccaccctgggcaatgggccccgaagcagccctacctctccatctcttgggcaactcagtgggagaatcagcatattccagtgagcattgcatttcatgtcaggaaaatggtattttacccatactacttactcctttatggtcttggcctggtgcctatgggtggcacctgcacaatggagaagtcactgaccagcctggagttgatttaagctgcagagttgattcctttctgaccaaatcatttggttttgagtctggcctggtgcagacctggagctcacttccatctgcagtgacctttgggagaggaggggcagaggccagatggaatccagtcttctctgctgcaggcttcccttgtgatctttttccacattctcaggccagggcatctttccctggaatttggagaggattcagtgtcctcttttagttgaggatcttagcagatcttgagtcatttttgagttcttgatgatgatgttagcagagaaaaatgcagtgctgttagaagtttttaaagctctcataccttagtattgagtaggtctcaggttgtcactcatgattcattgactcaacaaacactaaagaaaggtaaacatttggtgaagacactatccttgtcctcaaggagcatggaatctggagtggacaaaggaacacagatgggacccagggagctttggtgttgaggtcctcttttagggtcctctgccgcttggctattttgctcctggaaggaagaaggaaggttgtgaccggtgcagatggagtttgtaggaaggtgtcaagactgaagtcagccttctgggtagtagaaacatactgggacctacttatctattacactccttttgcaagattcagaaaccggatgtttaatatggctgttattcatgggagtagtgataggatatttctcttgtaaagattctgggtagtggcagaagaaattaccatgaatgagatacatgcagtgagaattgtgggtcaggactccaaggaacaggctagagagatgggatgggaggctttttagttttatggtaatgtagctattgacaacctaaggactcctaaaattagcattttgtagctatatgcaggtaatttccttttaagctaactagggaaaacagggcatttaagagatttatttctcttggaatttagaatacgctccataggtgcaaagatccccaaaatatgcaaggagttggatcttgacgatgtccttaattaactccagaagccatgttaagcttgttaaataatatagtatattaacatattaaatttatattaagtaacatagtatgctattatagttctttgtctatcatagttgatatagaattgaaaatgaaaccagttttccttagaattgaaaatgaaaccagtttttgtggagttctagattaaaaataatctgaaatgattgtgtgtactgggcatgaaaagaaaattcagtctttttttaagctccatagaacacaaatttgcatggcaccattccttgggttttagtgattgtaaaagatgctgaatacttagcttgggggcttttggaaacaaggtgacattctgctgatttgcagtggggctaatgatcattgtttctagaaaaacaccactttttgagtgccaagaaacatgctaaagtactaaagttggttcttagataaagatgtgtacacttgtgttagccttgatctttgtttagttttatcttttttacttatgccattcaggacgtgtgtgggtcatgttaatctcctgggtaaagaaatgagcaagtatttatttgattggcaaacaaataagcatgcacatgtattttatagatgcttgaaaactgtttcccacatatatctgaactgataaattttaaatttcgtacatgcatcaattaagtgaacacatttgttgagtccaaacacatttgttgagtgccaagcactgtgctaggtgctttgaggaatcaggatgagtgagacagatcctgtcccatcttgccgactgactaataggagagagaagattgcaaaatgagcttcatgtatacctaatagaagattgtatcattggagagttataagtaaagcgttaaagaggtctcaggagagagattacctccagtggagggaatcagaaaaagggtaatgaaggaaatgtgagagatacaaattattctagatagagggacccgtaggagcacaggccttgaggaaggaaatcatggcgtgtacttgggaaacagtgagtagttgcgtctggtgtcatgtatggagggttagaggtacacagattctggtcacccagggagtgaggaaggcagacaaggccaggctgtggagtgttgacttgatgctttgttgtgggttttcgagctggaaggcctcaagattagaactttgctgtgggaatacagtgactgtgttgtcagagcttagttgctggggattgggtgggattagaaagctgggggttgaggtgttactcaggagacttttgccataatttaggcagcaggtaatgagggcagaaagtaatgtgtaagttatgtgtaagaagtattttgggactaagctgatgtgtatttgaacctgattagattaggacatttatttattcaatgaattttgattaataatcctccttcctctctccacacagtgagcttggagctccctggccaggtgaggtcaagaagcaagaggcattaactatagccttaggtttcagccgtgcgtgactgtgctgggagtgtggtgatgcagaaacctgagaacatccagcccgttacacaggccttgagaagagtgtagaatttatctggtccttcgctttcagataatttcagataaaccattgcagacagatgagaatctcatctccccttataaaccaccagcagaggaatggattagcagtgagctattagggggccttcattttttagagagtgtttagggtagaacagacagctttaaaaaccatttatcttgtcctctttaaaatactcagtcataatcagtgtgcttaatcatgaggcccccgaccagctgtcttctccaccactgtcttcaaagctgacattttgacttcatatcagttttcaggaatgtcctttccatgcttccctttgaagggaaaaatgaaagaagcctttaaaaatagtaagctcataaatagttatttagagaggggatataaagttaggtaatttattttgttatgcctttttgcacgtttactttttccaggtgagagaaaataaatgtgcaatgggggccccggttcatttttagatgtgaacttctttcatatttccaaataaaagctcagtcactgcatggattgataaattatagatggaaaactgttctcagttttcctcctcttagatttctttgcttcatgtgaccatagatctctctcttctctttgaaactccaccttcctttgatatccaaatactgtcaccgccacctgttatttatcaatatagtgacaacagttataatgataagtctttctttgcacccttctctctgtttcattattttctctttcagcttcctattgtggccatcccatagaaaatggggacttgctgttctcctttcactttcagagagttgagctactgcctctgttccagtgactcattcctaagtcttgatttacatctttgaccaggacatctgtgagggtcaggagaaagctagctggtgaagagagaagatgagagaaaaaggtggaggataaaggagagtttacctcaaatggaagaagatctacaggtcttagtagaaggcttcagaatagagaagcatagtaggaggtgaggctatgaaagtgttgagcctccatttcatgttggaagggagggagtgctcctcagcgtgaaacctgcggacaggttggtgtgtcaactgtttataactgacctgtgacaagatgagttgtgcttgaagatgaatggaaaaaaaaaaaagttgagaattcgtgtttagaaacttttaacaaatcgacagggtaactttaaatctgttgaatctagcaaaaatttggggcttatattttgtatgggtttgttttttatttcatttattagtaattgtcaagattatttgtattttataaaagtattggtccccagtggcttggaggagaaagaggaccctcaccacacatggtttgagaggtcctgttgtaggtatgtgaagatggtagttggaggatgttccagttgaagtggttggtttgggccccagaaaccaaggggtgtcaggttgggaggcatatggatgctcacccgaggcaaagggagccctgatgacatggtgtccggtgacttgtgggagtcgcagggtggaggaaggtgtttggacacctgggtacccacacccaggtgaggcctagccccagcatttggtaggaatgtgtgtattctctgctcggtgaggccttctaggctgggaagggttccccacagtctgggtagggccgtagggctgtcaccagcagtgtcattttggctcactagccatgaatagagcacgacatctttcagtatgacccaggcttgcttttcatcgttcgtttgtccctgttcttttctaccttgcctctgtctagacttactgcacaagccttcctgttggttcttttcttttgtttcttaaatccttctctaatattctgacatagagagtgattctttctgttgctggctttcctggacctcttgtattctgagtcgtgaaccttcacatgggtcttttcctaattcggtcccttatctgacagtggctggtttgtctttcttcaaaagatggtgtcatgatggatgcccagcaaatggtaacacccgcagagtagtagagagtagattcggggaccctgggctggcagctccataattctttctcccttttctgccaaagagacaggatattaaaccactgaactggcgcggtcctgggctgcctgccaatggaatatttggggagagaatggtgcagcttttgtttctcttgccttctgtggagccctggggtggattctgaagggatgttttccctcgcaggagtaacccatttggtattgagaaagcaggaaagcaagttttcctgttacgagcagtgaacaaaaagcagaaaagcaggcagcggatggcgatatcctgttgtagaaggcttgcgggagcgaatgcagacaagtgcccctcattctttccgtgtctttaagaaaagccaggagatgagaaggaaattggttactttgcaggccacatccaaatggttttcctcttatttatggtgcttatcaaggaggtcataagtgtatgttttgtgatttaaaaacttgtcagaccagagatctataacacatgacaaattagaaaaacgaaatagattggtgggttttttggttggttggtttcccatgaggtcattcgaagtttgcttgggagggggcaatgaactgtaaaagtaaatgtaaactttatacaagttttatttatttttaagtttaaaatcacttaaagatggcacaattcctactgagttagatttataagaagttggcttgtcagatgctcttaggggacctttctttggtacattttacaatgaactagggatgggcatggtggctcatgcctgcaattccagcattttcagagaccaaggtgggaggaccacttgggctcaggagttcgagaccagcctaagcaacatagcgagagcccgtctctacaaaacataaaaaaattagccaggcatggtggcatgtgactgtgattccagctaattgggaggttgaggtgggaggatcacttgagcttaggagttagaggctgcggtgagctgtgatggcgccattgtacttcagtctgggcagcagagtgagaccgtgtctcaaaaaaaaaacaaaaccaaaaacaaaaaacaaaaagctttttcctctcttattacatgagcaatacatgtttattataggaaaattagaaaacatttacagacaaccaaacagtaccggaatgggatagaaaggcatggaggtggaaaatgagagtgatgtggtgagaaggaaaaggaaggtcgcctgggagcagtgggggtggggagagggccagggaaacctcactgggatactcaggcccccagtgagctccccttcctgtgaggctgcctcactttgatactacaccttctgttgtgactttataccctttgacgctggcttccccagtctgccatgggtctagacctgatcattccagatttgcttggcactagaaaactgtaatggcaagttgcaagaccagttaattcagtgcatctcccatcttgttagtcaaggcgagggagtgctaggcaaggagggtctctaagacaggcagatttctatcagtgagggagtgttgtgtgtgtgactctttgagaatcttggctataagggagataatattttttaaaagatgcagaaaagtaaaataaaatgtttttttgggggaggagaaagtgtacagcagtccttgacatccttcattgtctttttgaccctcctgttcccctcagtgtcttgccatattgacaaatgcttaggtgttctatggaatgaaacagcttgggctcactgttttatctcagtaaacatttatagagcagctgtcagtagagtatactttcagtcagctttagcttataaagatgagagatccttaaaaggcaagggattaaactgccttgggcttttttgtatctgtgaaaacatatttactgtcaaatccactagttattttattacaggtaatgtaggattaacatgtaaagggaaagtgaaggctcagactggataatctgttgattttggtaacttatttatttaacatgcattcactgagtattgttacacaccagccactctgccagaccctgaggatagagctgtaaatgggacagactcagcccctgaccttgcagaccttacagtctggtcaggacctaagtagctgatcagacagttccagtatagtgggatcagggacccaaagataccctagacaggatactgcagatgtgtggggtgccctgtgatgatatgagaaaggtacctgctctagacccaaggagtgacatcttataaagacagatattataagataccatgtctgttattgttatgttggtaaggacgtggagagatttgaaccgtcatacattgctggtgttaaatggtgcaggcacttggaaaacagtttggcgtttcttcagaaagttaaatatagagttatttgacctagttctatgacccagcagttccactcctagttatatatccaaaagaattgaaaatatgttcacataaaaatgtgtacttgtgtgttcttagtagtattatggataatagccaaaaagtagaaataatcgggccaggcgcagtggctcacgcctgtaatcccagcactttgggaggccgaggcaggtggatcatgaggtcaggagatcgagaccatcctggctaacacggtgaaaccccgtctctactaaaaaaatacaaaaaaatttagctgggtgcggtgacgggtgcctgtagtcccagctactcaggaggctgaggcaggagaatggcgtgaaccctggaggcggagtttgcagtgagccgagatcatgccactgcagtccagcctgggagacagagtaagactccatctcaaaaaaaaaaaaaaaaaaaaaaaaaaaaagtagaaacaatcaaatgtctgtaactgatgtgtagtatatccacccaatagaatattattcagccattcaaaggagtggagtactgacacatgccacagtatggatgaatcttgataacattatgtgaagtggaagaagccagacgtaaaaggccacatattgttgcattccatttatacgcgatgtccagaatagcatagagacagaaagtagatgagtggttgccagggactggagggaggggcatggagagtgactgctgatggtgtgagctttcttttggagtggtgaaaattagattgttatgatgattgcatgactttgtggatatatagtaaaatgactgaattgtatgctttggatgagttttgtggtatgtgaattatatcacaaaactttattaaaaacacaagtttgtattttgtcctgaggttggttgagagcctctgaaggattttaaacaggacagtgatgtggttgcatttgtattttgggaagatcattctggctgcagtgaagagttggcttggaagggactgttagaataatacagatgaggaacattgggaaatagctgcgggaatgataggaagtagacaggtccaaaatctaaaactcagtggggttgggtaattgattagatgtaggagggaggggagaggaatcaaggatgatgcctgtatgcccagctgatccatgggtggaagaacaagcaggtgagggaagaaagatgacctcggcatgccacagctggacccgtggagatgtccctggaacaggcccattgaggtgttgagtaggcagctgatacagagctcaggaacccagcatctcagggggcttgctaaaaatgcaaattcttggactcgactgcagacatttgagccaggatctctggtcatggtgtatttaccatggcccgccttgaagccacagtcgtgggtgtgatttctagtggtgagtgtgtagaggagatgaggagtgggtccctcaccatttacaggacgggtagtggagagaggacctcacaggagactgggccaaggccagagagataagaagcctccaggaggtcaggtgtcagggaagccaagggaagtgtgtttccaaagccaggaggcttcctggggtgccacaaccttctgagaggtgaagtggggtgtacatgcagagtttgcactggattcaccagtgaagtgatggctttggtaagggccatgggtgctgcagagatgtccccaaagcagggctcgtgtgtggctgctacatgtgccctatgagtgctttagggggtggagtccttgcagtgcttgaagggcagcatgacccagcctgccttccttggctctgttaccttctacagtgtggccttatttgagcataccaggtgcttccaggcctccactgggtgagggtggatggggggaacccttggtaaatggccctggctctatggggcacatagagcaggatgagggaagaggtgcagcattagggcagggggtcctgggacctgctgacacaagcagatgtctcatctggttcttcactgtgctctgtggcccctggcactgtttgtatcaagatatcaagtactcttggccaggtgcagtggctcatgcccataatcccagcacttggggaggccgaggtgggcggatcacttgaggtcaggagttcaagaccaggctggccaacatggtgaaacacctctactaaaaatacaaaaattggctgggtgtggtgacgcatgcctgtaatcctagctattcaggaggccgaggcaggagaatcacttgaacctgggtggcggaggttgcagtgagctgagatggtgctgctgcactccagcctgggtgacagagtgagactccatctcaaaaaaaaaaaaaaaagatatcaagtactgttagtacactgtgggtcagaatcaccccacccaggcctgggtgtttttgaagttgggacatttcatatttttcttggtttgttggtcatgtacagtttgagagagatattgtataaatacccttccccctctgttttggccgtcttttgccttttgaaatattgtctaataaaagttatgtaattattctaggattgtaaatctaggtctcaatcagtatacaatcagttttcaacataacagaattacagtgtattattacagtgtattatcagtataagaaaaataaatgggaatgacagtatgttcaaactcagttaaatgtgtgtcaattagtttactgtccaaggcgagtgcctgctgatctctgtgttgtaagctggtgtggcactcctggattgcttatctatgcttttgaaattgcttttctttaaggaagggattgttattgtttcaaacagctttgaagctgttccacttgtaaatttataatttgtatttttaatctttataagttgcatttgctttttcttttttaaagcagcaaatcagtgttatggaaacctttaggtgttaaatattattcttttatttgggaaatattgcacaacagcaagatgtggaaatcctccaaatgcaaggttgtccctgagtcagtggcttagtaaagaaatcagaggcgcaatgaagatctggtcctcagctcacccaggacttaccgtgccttagtggcagggtaattgtctcaaaattaagatttaagaataccattttccccctattcagtggttacctgttttgtgctgtaagatttcaggcccaatatgtcaactcgtaacattttgagactactacttattttttcttgtctgtatgctaggaattagatgtgttaatttggactcttggttgcaagtgacagaaactcattccaagtaattaaaggaaaaaagggatatatgttgtaaggacacagtatgtctccaagaactaaagggtgggggtccagctgagtgtattgagggggtcccagccttcaagatcctctcttatctcggctgctctctagagtttttgggtcctctgcctggagattgactttctttgcttctagtctacatggtaggaattcgctgtctgagagaccagctacttggcaagaaactggtccttctctcaggctgctctaatcccccagggaggtgatccacattgggtccgataccaagtcatggggtcatctgtaggaatgtggcttctcggatccccgctgctgtacgcatggctcctcagggccactgtctttcctcagggcgaggagctgctccttggcctccagggaaggcctgtcctggggggccttgcatcagacctggcatgaatgaccctgattgccactgggggaagggaaagaggacatctcagaaaaacaacacgttacagggaaagggaggtgccgggcagccaccccagcaggtgtactctccattaaatttattttagctgagaaaatagaattggtgggggaggagtttgttgcccccaaacataaatccatccagaaatgacttctaggttgctcatttctttgctctgggtgactgggagctggttttttagccaagtctgggccacacctagttgaatcattacagacataatatcttttttcccctcagttaatgtataaactaatattacttatcttttttaaagatattaatgtatctttataatacttttgcatatttagtatgtaaccttactttgataatgttttccagtaagatttgttgctttaaaagacaaactctcaaacaactttatcagtaccatttaatgtgcccaaacaatgtcaaacaagcaatgattggatagccagggaagctgaattgcctgttattagtttgtatggtgaaacatctcacaattgcactttcaaaagtattttttacatatatattctaaaaatgatcaaaacatttggcactccgtttacaggaaaaaaatatatatttccagggaaactctctatgttcactaaactggaaagaccttgtggaatttaaatttgtcatcttcaaaggctttggtatagaatacagtaaccagaccaggttctgtttcattcagctacaaaggcacttttgttgttaccattccacgtccctgtgatgcttagtgcagctgatatttggtcctgacagtgcttttggaaagcttggctgatttctgaaaaaaatcccagattctttggcctaggaatttatcataggcctcagatcctgggtctagtcactgcagacagctagtatatgttaaaagctgtcttagcctgtatctagtgtctgtcttcatttaaggctggagaaaggctgtacaggcttattaggcacagctgttaggaacctagagaacagttgacaactgtgtgcaatattatggtaatagtataacttattaataatatcaatgtagtcaatattatcaatgtaattgagtaatacagcttaggccacaaagaactgcatatagttttccattaaaatcccaatccacattccatatgcctctcttcctgctctgccctgcacaactgaccctgtgcgcctggctgctcctctcttctaatttctcccattgcggtcccctccacagttaagcaccggctcgctttctcttaggtgcgatgcccccttccccgcactggaggctgcccagccaacgcagacgttcccacttcctgttcacacagaatcgcctcttcctttctcatttctcacagggagtcctcttttcctgctaccgcatggggacacagattttgtttttgaaagtttgtagaaagttcctttagtgctaatctccaatgggaccctaccctacacagagggcaagttattttcttcccattctgttttttggaacttttatttaatttcagacttatatgaaaagtcaaggatagtataaggaagtcctggtgtaccctttaactagataccccggttgtttcaaattattattttttgctaatccatagtagtagagtaatgggccattcattcatatgttcattcaagaaaatttcatagcagaacctttgtgcaaaaaaagtggatgaggcaattctttccctgcttcatttctactattagcaattcatgactgatttagctctttggtttgtgaaatggatgactgaaaacctctcctaagttaggaaagtaagtgaagaaggcactttaaaactgaggtgccatcttttttgtcttctctgtgggatattcatttaaaatttttctcgtagtaaaggcaagcacagatggaaggtggtataaggttcagcctcatcccttaacttcagcctgatggtgcttgtgatagtgcttgatttgctggtgatactggcgtagttaagaatctcccagcttaggagagagaacttaacatggcaaaggtaaaaagaggagcaggtttcatcagactattgtgctttatgcttgaggcagggcagtagcaatggaagaacttagatgtgattctgggcttatgccttccctcttgcttgccctcaaaccctgtccaaccaacaactaacagcaaaccaagtttttagatttatcacagttagggacttaactgctttatgtggacttgtgtggctttctcagctattctgtaaaacctgctttattaccattgctattatttctgctgttgtgagctcagtgtcagtgtctggttgttaggatgtacaaagattctgggtgaggctatgttggtctagagctctaggttatagtgggccatggaagcccacctttcaaatttttggcgaggccacaaattaccccattaagggtctcagagcatggagagtaatgtttttatgttttaattactctagaccaaggctgttttttttctaagtgagagcactaatatttgtaattttgcagccattgggtttataaatatgcctgagtaatccccatgaactagattttagagtgagccaccagaagagtctcctcttttgagatgcggcaaagaattgcagtgtcttacagtggaaaaggaagacagtgaaaaatgatctatgcagaaattcacccctggttttggcttttgacttcttcatgactcccctttcttgcttaccgtgttaggcagataatcttctttgagatgtggtagtcagactaactcagccccatctgctttgtgtttttttttcaatgcaagattaaccctgcttccaaaacctcctggtgttttcttgggagtaggagggtgagtgaggggaggtggagggtgtggggtgcttcgctcctcttgtaataaccctcaagtgtgtgctatctgatgggcccaggccacatgttgtgctatcgctggggaccaggtaacagtctgaggtttcttggttacagtaactgatcctcactccaggccctggcaggaaggagaaccctcctgcagttactgaaacctggttcccggttttaatttctttaattcttttgtacaagggtctgagttacagaggtttctccttgtctcagaaagttcttaccattggctttaaataaaaccaggtggctttcttggttcaagtggcttacagaaagaataccttagaaagcaatttaattcaattacatttaattaaattatattgaatttgaataattaaatttatattctaagtttttttcttagaagcataatgagctattttagaaatatgtattaaggttgctggttttttccttctgccacaaaacgtgatttgcatgggaaattatttatagtagcttagaattctgaacaagagtgacaaaatttatcttctttgctctcctgcaaatttgtataggcttaggaaattttgtcatttaacaaagctcttgaaatctctgtggcttaagttactgtggacataattcttatctgatttcaatagaaaaggacagtagggatgtgaacacagtggcagctgggagagggcgcaggagtgatgttagtggtaatctattttattttcaggtgtgtttaggaactgggctcctggagacaaccaagaaattgggaactggaagtggtttgactgaaggagtaatgggagagacttcatcccaacggcgaatccctactgaggcctgaaaaacctaccattagaaattcattagcatcaatagagtggagagacagccaatggaatgggaggatatatttgcaaattgtacatctgataagggattaatatccaaaacatataaaaaactcaactcaaagtgagaaaacaactcagttaaaaaatgggcaaagagcctgggcaacatagtgagaccctggtctctacttaaaaaaaaaaaaaaagaaggctggtgtggtggcatgtgtctatagtcccagttacttaggagtctgacgtaggaggaccacttgagcccaggagttcgaggctgcagtgaaccatgattgcaccactgcgttgctctccagcctgggtgacacagtgagaccctgtgtctacccccacaaacctccccaaaaaaaagggcaatagccatttttcaaaagaagacatacaagtggccaacaggtatatggaaaaatgctcaacatcaataatcatcagggaaatgcaaattaaaaccacagtgagataccacctcacaccatggaacccttggatacggagtgtggtctgtactttgaaatcatttaggatagcagaatattttgtggaatctagggagatggggagctgaggtcagggagaagtaagctgtgtgctggcatttgtttaccaggagatccttccatcctactccatggccaggcagtgagtagtgggccaggggtgagggtctctgtggaagcacaggatgctgacattagacagggcacactcctacctttgctgcatatccactgccccttgcagggccttcatgtttccctaggggctgtggagctgtgcccatcatccccactagaagcccccagctctgatagtcaagcatttccatggggaaaattggtcgtgctgagagctaatgacttatggttattaaggatgttttgaatctttaaacaggaatggtacttggctgaatatcagtttggcttctgttgctcattgcatgtcttctttattttcaaaaagccaactgatttctctttcatatgtggtgtttcctgtggttctggtgtttttgtgaacaaatttgttatgaggaaattcagcagattgtgagttctgattttttttttttttttttttttgccactagtggaacatgttctttagctgcaaactggaaatgtagtttttattggttgaattttgatagggtgtacttgctttgtggatcatcctgagcaattgggaccacttttgtctggggtttgaagtaattgcaggtgaaaaggatgagtgtagtggtggtgaaggtctcatttctacagctgagtcaagtcgtctgcaggttgtgttcatcattcacattcctgctttgcttggtttgcctgggatgtttgtatcactatcagcgaatgacctttagagcattcggataaccttaagttctgggtattgaaaagatgtatttttctttcctgtttggatgaaattttcattagtatgaaagctgcagacctcatgtttccattgcgaggttcaagagagaaggtagaagaatgaatgaaaagtccttgggactcggccccaagccctcggtgaagaagttgtgcctcctcaggctctgtctgcttcagggactttcaggaagttgcaggtgtgttgtgcctgcattgtgggctcaagcagaaatcagtaaagcaaagagcaagaactgagctttggcgggaaagggggagcctgaagagctcacagtgtcaaaggaagcactgagctggctcctaggcaaagaacatgccagaggcttcccttcagcctttcaaggccactattacctccccttccctcccccattgcttcaggtgacagtggaggaactggaagttgcacagaacacagtggctcgcacagccctttattgctggatggagaggggaggggtcctcgcagaggcgggctgggaagctgggtgggcaggtgatggagaggaagtctcccactgagttcttcatccttcttacgtccacctgtgcaggatgagctgcttgtgcttggccttacgtcctggcagctgtctctgaaaagttttaatctttgattttgagaatcagacatctttggatccaagggttaccaacacctgggggggccatgtatatgaagtggaggctggttttagagcaacgacacattaaagtgggctgggctacagctgctctaggggatagatggagagagtttgtgggacttgtcattagtgtctacaacatggtgggtgcttatgacatgtttattttttatttatttacttagagacggagtctcgcatgtcgcctgggctggagtggagtggtgcaatagctcactgcaacctccccctccagcattcaagctattctcctgcctcaacctcccgagtagctgggattacaggcgcccgccaccacgtctggctaattttttgtatttttagtagagacagggtttcactacgttggccaggctggtcttgaactccgacctcgtgatccacccacctcagcctcccaaagtgctgggattacaggcatgagccactgcgcccggtcatgacatgttgattggatgggagaataagttagtcatgcaaggtcatactgtttgtagctgattcaggtttcgctgtctcggatatttccattcgtgtatcactgcaaggggaagtggttttgctttttttttctcctacaggcctgaaatatggaatgaactctaggtacttgattttaattaaagcattaccaaagtgttatttttgctctgtgacatagataaactacacatgctatgtgtctttccatttttgatttgtttttacttgctgtccatggcttgaaattttagacaggatccaacatgcaagcaggtgtcatcttacatgttgaaacctaaatatcctccataaactttgatagctccataggttattttcagtattttcacatatcatatttcaattttttaaatctatagcataattgcttcttgtatttttagatgtcatgaagatgttggcctaggagagaacctgcagcattcattatctggaaagatcaatcatttcctaatgaaatccagttttgtatgttagggatcattatctgataatacagtatgtgtcctgctttcaaaaatttagctattggctgggtgtggttgctcattcctgtaatcccaacactttaggagactgaggtgggagtatcttttgagtccaggagttcaagaccagcctgggcaacatggtgaaaccctgtctctacaaaaaaattgtagaaaattagctgaacgctgtggcgcacacctgtggtcccagctatgtgggtgggaggcaggagaatcacttgagcctagaggttgaggctgcagcgagccatgattgtgcttttgcactccagcctgggtaacagagcaagaccctgtttaaaaaaaaaaatttcagctgttacatcagtagcctttaacacactccctcagtccagatttgtctttttcttttcttttcttttcctttttttgtagctgggactacaggcgtttgccaccatgcccagctagagttgtctttttctaagatgtccttactccatggccacaccatgcctcccgatgacaaggctgaccacactgcccctgtccaaggagcagccttcagcattgcctgctacctccttttggccagatattctgaggttggaaggtgaggggtgataaggtatgtggattcagaagtactgtaaacatactcagatgaacagtattaccatttaagaattttcatttcacagttgggtttcatctccaaaattcttgagtaatgagagaattgagtaagggtagtcattgatgattctgttgggtccagaaaacagagtgattgattgaagtctgtacaatgccaaaacatatttttaactattcattttctttccattcttagccatacagaaaataaccaaacaaaaaattaaacacgaactccacagtcagacttattcagctgtttattattattatattcattatttgtacttagctatgattattcagcttattaagctttgctgtttattagtagcagagcttaatgtcagggatttgaatttcgctttttggtgtgaagtctttacctaacaaagtgggaagtcccgagcagtggtcagtgatggaataataaaggtacaagtatattagtgcttacagttacaaagagaactgtagagaatgagaaatagtggcactgtgaggatgggagtgttgcatgtgagctgtccccatttgtcatagcagaaagtcagttgaaaatatttggaaaggataaaattgagaaatctgtatgttacagttatgggggcagcaggaggagagcaaacactggaagaagcaccaaaatatggaagggaattgcctccgaggagcagggctgggagtggagtgggtgagccaggccacccttgctttccgtgataagccctattattgtatttttagttatgtgcttgttacgttaatgaacactgatgaacacagagcatgcattattcaaaattccttcttattttcttttctagagtagggacaaataagagtgatgagaagatgagcagtagcagaggggaatggtaactggggaagctccgctggggtgcacgcaggctgtctccaggttggctgtcttcaggcgtgcttcttactccaaaactggaaacttggtgaaaatcctgctgttggctttgagccggcagaaacaaaacaaaacaaaacaaaacagataaaactgtaaaccaagaagcagcacatgaacacttttaaacaccgtatgaagattttccataactttaaaatacaatggaatatgttctcagtgagaactgtcatcggacatcagtgtttgattcgtgattttgctgacattgaggtccctggtgctgcccccaaactggaggcctgcccagggtgaaactttgtgtcagagcccaggatttgactcctaggagctctgctgttgggtattatacaggagggcaggaattgagttgtaaaaggccagtgaaagggagggagaacaatacattgagtttgtatccagggacactttcctggaaaggtggttgcttgaggctgatgcttcaagattagggccaggcgcagtagctcctgcctgtaatcccagcactttgggaggccgaggtgggtggatcgcctgaagtcaggagttcaagaccggcctggctaacatggtgaaaccccgtctctactaaaaattaaaaaaaaaattagctgggcatagtggtgtgcacctgtagtcccagctactcaggaggctgaggcaggagaatggcttgaaggtgggaggcagaggttacagagagccaggatggcaccactgcactccagcctaggcgactgggcgagactccgtctcaaaaaaaaaaaaaaaaaaaggattagaaccactgattctcagaaaaagtttgactttcattattttcagacaacacctaaggagtgaaaataaatgagactaagaagatgttcttaggccccagaatgtttaaaagtagaaagacaatttccttattctaacctggggaccctgatggtaacagacgtgcttatgtgctgcgatggcagctgatactcctcagcctgtggttctctgccccatccagagagagcctgaatctatacacagaaaaggctgtgtttctgaggaaataaaaaatatgtacttttaaaattttctaaataggccctacttctagggtcagctggcgtgtatttcaattagcacattatcttgggaaactttaccatgaggaaaagtttactcataggcttggccatttttatttatttgacccccatgaatagtccaacatagccaccaaaaattgcacagatgtcagtggctgtttggccgtgttttaaataaatattttgtcttttaatcatcagagataggagattaaacctggactcgtccaactttggctctcttcacgctcatccttatgggagaggaagtgtcaagatgggctttcctttggagcataacctaaacaggaaccttttaaaaacctatccaaagctacactttgtaccttaaacgcaggcatgaagtatgagacatttctggtgatgtcttcaggaggattaagaggtcaggagttagatgtaagaatgaaagtaaagtaagtgatagatctaggcagagaaagatgttgacatctgagcttatactctgaataaaacaggtttccaggctgtgtgtgtttattttacacccatgcacttacacacagtatgtgataacacagcagtgattcacagtggctcttcaaggcccctcatctgtgagtcctggactttcctgtcaggtgtgccccctcataaccaggcatgttctatgaggtgtttactgtcgagacaagtcccacaagttgggcaaccctttaagtgctgttttccggagcgcagctaaggaggttagcatactgggcgcaaaatccttcctccttttgaaaacctcaaaaccaacaaactacttcctctgttaatctcatgggtgagtggcaaagcccaggccaagcccttggttgtgcaatgtgttatggccctggagttaaggatcctcctactcaaagcaggagggcatcattccagcaaaacctgttggtgtgcgtcccaccttccaagtgaagatatgccaggtgggaggtcgctcggcttgttctgccccgtgctgagcctgggctcagtgttgggacatacatttctgccttttctgtcgttgcttaagatatttcctggttgtcttgtgaattctagacacagtgatgctggtttttttttttttttgagactgagtctcactctgtcacccaggctggagtgcagtggcacaatctcagcttactgtaagctccgcctcccgggttcacgccattctcctgcctcagtctcctgagtagctgggactacaggcacgtgccatcaaacccggctaatttttttttttttttgtatttttagtagagatggggattcaccgtgttagccagaatagtctcaatctcctgacctcatgatccgcccgcctcagcctctcaaagtgctgggattacaggtgtgagccaccgcacccggctgctgttttttttgttttgttttgttttgtttttaaaaagatgattaagctggtgaggcatctctttttatatatgcattttttgacaaaaattccgtatatttagggtatacaacatgatgttttaaaattggaatggttcaatcaagctaagtaacatgcaatacttcacatacttaacattttctgtggtgagaactcagttctactctcagctatttatttactgtagtcaccatgtttatactgtattccccctagctaactgaaattttgtatctttttaccaacatctctccaaaccccacccccagcccctggtaaccaccattctactctctacttctgtaagtttgacttttttagagtctacatctaagtgaggtcatgtagtattagcctttctttgcctggcttacttcatttaacatgatgtcctctatgttcatgttgttgcagacgatttctttctcttttgcgcctgaatgatatttcattgtgtatatacggtatacaccatattttatttatccatttatccactgatggccacttaggttgattccatatcttagctgttgtgaatagtgcggccatgaacatgggagtgcagatatcgctttgacacagcgatttcattttctttgggcaagtacccggtagtaggattgctggatcatatgctagtcctatttttaatcttttaaggaacccccatactgttttccacagtggcttcactaatttacagtcccacaaacagcatgcagggattccctttccaccacatcctcttagtgagacatctcttgaagaaggtctgtcgacttgggtaccactgaatggtttgtgggtgaatatgtctatgggctggaattgtggtgggagttcccctctgctctcagtatggtaaaatcctgtcctgctcctgagaaacacgggtaggaaggcatggaggagcttgtgcatgtgatggaagaacctggctgtacagtcaggtgacagtccttttggtttttcttttacttacggctttaagcactgtattatagtttggggagaatgattgctcttgtcttcaacacattgttaataagggagcccaaagtttgtgtcttttaagttagctccgtagctttttgttctaaacttttgtatttccaaattcatttatttttggtggcaaaatttgcacatttttaaagtgttagtgagtagtctgtatcactttgaaataagagctaggaagcgatcgtggtattcatacataatagtctggtgttcctttctggttgccatggtgtggtggtcctgatcagtgtgggtctgactggggtgctcagccaggtggcagacatctgtggtctctagaagctgaaatacttcagctataggaagcatctgctgcttcaagaacttcacaataagcatttattgatgtcctactgtataccaggcatcctgctggttgctgagggaacaaacatgaataagacccactgcctgcagtgttcttgattcagtgattccaccagaatcaattacaggaggctggctggtggcttcactcaatgtctgtgtttaagattaatttgcttaataaaactcagggcagtgaatacacagggttggccctggctttcctgttacgagcattcaacagtgtcgcgtgagcagttgaacatgccttgtaaaccatggttgagtctccctgagctattgttagcagataactttagagcagagctaatctgtcatataaataagaatcacaattgggttacatggtaattaaatataaatggtaagtgagtgagtcacatttattcattcattcagcaaacttttattagaggcctctggtgccaggcagtgtatgaggtgctcttctgaggctggtgtggagggatggtcacaccagtattgtcctgcctacagtagtggcatatgtagggcagtgggcggggacaagcaaacactgaagctggccgtcccatcatggagggcctcaaggagggggcaggctgattgtggaaaggatgtgggtaagatgaggcagggtaaaggagtaagttctccttcattattagcaattactttagaccccatgttccttctgggatgtcctcagctcccttcccttaccccggtggacaagaaaatagatagccttggcagctgcacttttatgtgtcttgggtcctgtttgtggacctgtttggcagcctccctctctccccgacgtacctgcaagtgtctgagtcctctgctcctgggttctgcatggcaactgatggaaagctagaggggctgacttcccaggatatgagaccgtagagagacagatgggctgccccttctcagggagaagagagcctacctaggatttctgggctggggcaggggtgcctccgggatgggtggattccccacaaatgcccaggcttcaggcagcctacagctgttcactgagagtgggctgtcttcagggccagctggaagagaagtttgatttctgaggcaaggaatagactgatgatatcttccccagtttcttccttttgcctaaaagtcctactgaggtcactgtaggggcttccagggatttggagctgaccaaggaagaagatgtgaccctgagaggcagtgacccatgagctttattggatggcggtgggacagggttgcttgagaggggatgtccctcacgggctgaggccatctggggccaccactcagaagggactgtgtctaggtggtgccatgtgcctagatgatgtcacccagcagtgctgtgggagtctctgggtcagagagctcagaagggccatagctgcttggggccttgtaaggccctatcttgtcagtgggtgacagttttcaggcaagatttcagtgggtctgtgaagcaggctacatggcaaaagatctgcctgtttggggctatttttaaaataattggatgtataaaaatttgagtttgatgctagagggcttttgtgctaactagtctccacctgcagtgaagaaataaactacctagggacaatctttggcccatttatataactgtgacaaatctttctgttccacagttgaaagtaaaatgtctaaaaatgtaaacgcctggggaatagtaactcattggtgttaacatatttcaatcaaagcttaaaaatattttcacgttccttcctcttttgacaggagattgctggcccctacaccagatgtcccttaggcacctccaatccatgtcctaaactaaagtcagtcattgcccctaaacctgctctgtctggggtgttagtgataccgtcttccctgacatccaagcagaccgtgggactcacgtcccccatttagaaatctgggaaggatccccgttcagcaggactgacgggaggcagctgatgtgcaggaagagaaggctggacagtgtccttgcgctggacatgttttggacagaaggtatggaagggaagaaaaaagaccagattcataggaacctcacaacatgctgccctgccacatcttgctgcctgatctcaaggcagttaacttttggtgcatcagtgactatttgtagcacagagataatacctgttagacttgttagaattattgtctgtaacagaagtaaaagggcctgacttattgcaggctgccaattaaaggccaccagaaaattcttccaaccacagagtttcccatgttaaccatattggtcccatggtaatcatactggtttcagtatttgtttcctagggttgccgtaacaaattatcacaaacctggtggctgaaaacagcagaaatttattctgtcacacttctgagagaccaaaagtctgaagcctggcagggccattctctctctggggacttaaggagagaatttttctttgcctcctccagattctggaggtggttcttggctggtggccatgtcaccccagtcgctgcatctgtcttcacgtggccttctctgcgtctgtgtcttctccgcttctgtctcttattagcatagttgtcatttgagttagggttcacctgggtaattcaggatgatcttatttcaagatccttcattatatctgcaaagattcttttttcaaataagtcacattcacaaattctggtggttaggatgtggacatacctttttggggaacaccatctaacctaccacagtctccatctgtatcctgatgagtaggaagtgtacttcaggaaccctgtggcctgcactagctgtccacctctggggattgatggttttagacaatgtagttcattcttagcttgtggtaaaactttttttttttttttgagacagtcttactttgtttcccaggctggaatgtcatagcctgatcatagctcactgcagcctcgacctccagggctcaagcaattctctgcctcaacttcctaagtagctgggaccacaggcacatgccatcacatatggctattttttctattttttgtagagaaagggtttctctatgttgcccaggctggtcttgaacacctgggctcaagcaatccacctgccttggcctcccaaagtactgggactacaggtgtgagccactgtgcttggccagtagaacattttaaaaatacaggagagtgtaaagaaatcaggggaaaaaaatacatctgcttgtcttatttctacccactgtcctgcttgaacttcttcatgcccccagtattcctttcataggtgctctggccacagatgtccagtggccccatacacagtagctccacactgttgactgatgactcttagacacctctggataaaaggttctgcagggcccaccttgggtattagtagaatgactgggaatcagaaaaccaactcttcaaatatttatgtaggctgccaaaccagttttcattttgtttgcttttagtggaataaagccatcttttgttacattgctgacttagggaatagtctcattaaccatgctttggggggtcctggatggagcaggagtcaggaaggggttggtcaaatacatcctattatgatttgtgtcctccctccctcctaatttctccaccctctgttgtcgtggactcctgtaggatgggacagatcttgtctctgtgtatcctctcccgtgtctggcgcacagtggaagtgcttcataaatgtttggtgaatgacattttgaattctgggggatccatgaatgatttatgctgtcactaaatctggtataatgtttggattgagttttaaagtagaatgctttatttatacaatcaccatgtacaattttttttaaaatttatatatttctgactatgatattgttggtttctcagaaagtcagcatcaggattttttttgtttttttgtttgtttcttttcaatttccttttgggtcttaacagtattgatagattattgctcctgctgactgtgttataaaaaggacttgccttagtttgggctgctgtaacaaaatgccataggctgtatggtttaaacataaacatttatttctcacagttctggtggctggaagtttaaaatcaaagtacctgcagatctggtgcctggtgagggctttcttgctggtttgaagatggtgacttctcattgtatccatacatgaggtaggggtgcgggagagatgaagcaaacactctcttgccttttcttataagggcactattcctggggcttagtcacctcccaaaggacctgtctccaaatattacattgaggattagatttcaacatatgagttttggggaaacacaagcattcacttcataggggaattatatggcaatagctcacattagttaatatgctagaggtaggtactgttactgtccccatttgacagatgagaaaactgagtcttagaggagttaagtaacttgttcagggttacatgccagtaagaagtggagctggaactcctcaaatcagggctgtccaccctcagtgctatcagaaatttttaactccataggacagtccagataggattttgtgttcaaggtataatggtactcagcccttaatggttttactgcgttgatggttgagcaaagggaaacactcattctgttaccaagaatgggctcctcttcacctcttgtagaaaacatctctgctagacagagatccttatgggaatgaattacttcactatatttataccacctagcatagtgcttgttgagagaatggtaacccaatggcatcattttgcagagaatagccatgatgttttattattatcattgatattaaattaaaatattacacacatgactttctaacacattttcttctttgtaacattttcccacagtttcatttaagagcagggttttcctttagtaaaaagtaaagtaactttcaagtatgaagaaaggaagaaaatggttttcttcccatgagtcatggttggcaatagtgtacttaaaagttagattgtagagccattttcacacccatcaattataggttttattttgtgagctggaatgccatggcttttaagactcctgccttatgtatggtagagtttgtgaacataattattttgtatacaaaacaataaattttctaacttcaaaaagtattttatttgctggacctattacccagacagatgttgtttttagaatagtgccttaaaaaattaatctgtaaaagatgttttctgacagcttttgtagtctttgccgggtatagtaaatgcaatagcacagagttttgtttagaaattctctaggaaagtaggcggatgtaaatcaagtggattaaaaagttaagttatttaatgttttataatcagaagatgatgtggaataatgaatgtcatgcagcaaacatgcatagcttccaagacatccattagatcttatatttgtgagtttttcattgtgctttaagaaattctcatagtggaattaggaggactttggtttatccacaaatgctcaataacttctaggtactacttatccttccctttcgtaatccccctttaaagaatacacatgtgcacaggctgagtgtaaatgtgctttcccaagacagatgccataagtggcacgtgggaaaactgaaatccttttgtttttcaagggacagggtgtgaaatattagttctttttctcttttatcagaagctagttttgagttgaaagtggcataagccggacgtggtggctcatgcctataatccaagcactttgggaggctgaggtgggtggatcacctgatgtcaggagttagagaccagcctggccaacgtgatgaaaccccatctctactaaaaatacagaaagttagccgggcgtggtggtgggtgcctgtaatcccagctactcgggaggctgaggcaggagaatcgcttgaacccaggaggcagaggttgcagtgagccaaggtcacgccattgcactccagcctgggcaacaggagtgagactctatctccaaaaaaaaaaaaaaaaaaaaaaaaaaaaaaaaggggggcataaagccagtttttcagcttaatagttatttccggttaattataaagactaggatattttgataactttagagtctgaatagattcaagctaaaacaagtgagcatagtaaatctgagaggctgttgtgtgaaaatattgccttaaagacaattttcccctcaaatcactttattgatgataattgatgtacattaaactgcacatatttaaaatacacaatttgataagttttgactatatacacatctgtaaaaccattaccacattcaagatgatgtacatgtttatcacccccaaagtctccttgtgccttttatgatccgtccttcctgttctttcctcatccttaggtaatctaacacagatctgttttgtgttactctgaattagtttttataaaaatggaatcagagtatgaactcttttttgtcttcttcacataatttgagacgcatccatgttgttgtgtgtatcagaagttcatttctttatactgatgaattaatttgattatgtggatatatactgtaatttatcagtcagttagtttgttgatggaaatttgagtttattccagtttttggttattaccaataaagttgccatgaatatttgtgtacaaatttttatatggatatgtgttttaatttctcttgggtaaatatctataatagcagtggaatgtttgggttgtatagctggtaaatgtatactttttacaaaactgcaagattattttccaaggtagttatatcgttttatatttccaccggcagagtatgagagtttatttgctccacatccttgccaacactttgtatggccagtctttaattgtagtcatttaataagtaggtaggagtatctcattcagttttaaatttaatatccctgattagtaataattttgagcatctttaatgtattgctttctgtgtattttttttggcgaaatgtttgttccaatcttttttgtattttttaattggttttcttattgagatttgaaagttctttatatatctggatacaaatctttaatcaggtatgtgatttgaaaaccttaaatcactgaattaaattttgtttcttttgaataatttttttctctttttgcaattttttattgtaatgaaatacacataataaaatttactattttaaccacttttaagagtagagatcaatggcatgaagtacattcatgttgttgtctttttaaaaaatactgtagtccaaagtcataaaaaatccatcagagtctgagctctatgagggcagaaactgtatcttattctcaattatatttgcagagcctatactatgcttggcacacactaggtccaaatatttgctgaatggacaaaatgtttgttttcagatgtcttagttgtttcggtgttagtgtcttagctccagctgctataaaaaaaatcccattggccgggcacagtggatcacacctgtaatcccagcactttgggaggccgaggtgggcggatcacgaggtcagaagatcgagactatcctggccaacatggtgaaatcccgtctctactaaaaatacaaaaattagctgggcatggtggtgtgtgcctgtaatcccagctacgggaggctgaggcaggagaatcacttgaatcagggaatcggaggttgcagtgagccaagatcactccactggactccagcctggtgacagagcaagactctgtctcaaaaacaaaacaaaacaaaaaaccaacaaccaggtggcttactaactacaatgatttgtttctcacagttctggaggccagaagttcgagatcatggtgccagcatggttgggttctgatgaggaccctcttccatgttaaagaaggatgacttctattgtattctcacatagcagacagagagctagcaagctctctggcctcttctttatacgagcactaaacctacccattcatgaggacttcaccttcatgacttaattgcctcccaaagttcccacctccaaataccatcatgttgggattagggtttcaacataagaatttggtggggtagggagcacaaatattccgtttgtaacagtataatagggttctctagtgaaacagaatcaataagatgtgtatgtgtgtatgtattatacatccatgtatccatatgtttctttctattttaaggaattggcttaaacgatcatggaggcttaaaagtccaaaattgcgaggctagggtaggcaggcaggcaggcttggaaggctgacaagctggagacccagagaagagctgatgttgcaattggagttcaaagtgagtctgttgtccgaatttcttcttccacaggaaaggtcggtccttttcttaaggtcttcaactgcttggatgaggccctcccagattatggagggcaatctgttttactcagtctattgatttaatgttaatctcatctaaaaattaccttcgcagaagtatccacatgtatttgaccaaatatctgggtactgtggcctagccaagttgacacataaaagaaagcatcacagttaggatatactttaacaaagatcaaaaaacaatgccttataaaggatggaagttaggtttactcttagtccaagtgtaaacagttcagggttgattgatgactctaccattttggggtcccaggctccttctatcttgttgctctgccattttccacatagtacttccttgtagcagaaaagggagatggtatgggaatggtgtactccttcccatttaagtgcatgactttaaaattgcacgtatcacttaacacgtcccattagctttaactttaaccatcccattaactggaacccaatccagtagacacacttcagtgcaagagagactgagaaatgtagtttttggctgggtagccagaggcccaccagcactgctattactatatcaaaagggaaggatagatgttggggtgagggaggtattcatcagtctctgatagtgttcattcatgttttgtgttgcattacatttgattggagttcagaatgtttactaatattaaatctgctcattcaaatttgagagattgagagttgtgacacaacttaagtttcataattaatgttattgaatttgatctttcttctgcatcttaaagcacgtgtcttgagcaaacctgcacatgaaagttgacataccaaatgggaagctgagacagaagacagaaacacagattcagaaacccaccttgttaagactgttccacttcattctttaggaagtaggtgactgtgaaagttttggagcagtgttagaatatgacagattggggtaatgggaagataatccggtggttccacattgattgctggatgacatccaaatgcatccatatggcttacaaggaactgcctgtctgtttcacctcaactcctggcatccacctttactgcctgtgttctggccacaccgaatcacagttccttcactgttccttattattacgcatctctatgtcttctaacaactctgctcaccatttttgttacctttttaaaatagaaatttgaagattaaggaaaacagataaagggcccttaaattggagcctactcaggtccacctatctgtctctgctgttcgttgagtgctgcggtgtttcaggaatgtgttaggtgcattctttttgtcacctctccatcctcatggcacccctgaggggtgtgccattatccatgttttgcagatgaggagctgaggcagaagtttaatgattgactcaaggttacaacagtcagaaactgacagaaccaggaattttggctgacttctgagcctgggtttttcccaccacatattgttctctttggaaagaaggtcttaggcttaagatgattagtaaacacagtatatcaaggggctgtggaatctctgggagcttcagcttcagtttggagttacacctcttgggtgtgctactggagagctgttacctcagtgacttgtgatgtgacctgctttgccgactctgtacttatgttgggggaaactggggaaatgagggaggaagcaaatttggaatatggttttaaccagttggaatgaattcatccttgactcctgaaagcttgtaatcttcataatctcttttctagtgttgctattttggatatgaggtatgggatagcagatgaatgctttagggttgtgtgagctgaacagtattaaaaatgtgcttttctctcatcctgaggatcttccattaatccactagatggagcagctggtttgaatatatttcatgattagaagttggaagaaaagacatggtgttcatatcagagccatgtcacagaccccctgaagttggccaggcattttgatctctattttttcctctctaaatataaaacttttatttactcagcacatctatatgtagggagcatttgaggttcttctgggacctgacagaaaaccatcatggtagagtagaaagaattctaatctgaagtctggggatgtgagagtagaagtcctagttcagacactttagttctctgtgactttggtctttaaccgtctttaagcctcagtgtcctcacttttatcactgttgcaataggtgagatgtgagatgtgccttctacaggttaggtatattgggcctctgtgccatccctttagaccacctgcgcgatcaaagatgcacgagcttccattttgcctgacttgaaactgcactcgctgacagtgtctacaacatggaaaatccatcccactgaagactggagggtttgttgacggcattagttcatttgcctttgtgatacttccgtcacccacgggcattcccgctcatgcatgaacccctccttggggcagtagtttcattccctcacaaatggtttatcctattttagggcaacactggttattagagtttttacttattggtcctggttgatccttccagagcagcccatatcttgtaatcttatctgtctttcatattcagattttctgttttagaactaaggtggaatatttgttttttgccttctctactactggtcctgcctgaatgatatgctatataagaaattagacatgttatcaaaatgctttttagtttttagttctcaactgatagataggaaggtggctatgtatgtttaaatctgctacctgtactcagatgtcttaaaacatcatatgtcctagaattttaaggtttcataacaaggaactattctttaacagttgttgacacatttgttcctaaaagccaatgatgtcttacttagactactggaatctgctcctaagtgtttaatgaagtgaaattaaaacttccatttttaggtagctttgaactatgggaatgtgtaacctcactactcctgatttctgttaatttttaattaaatacacatctgctaaattaaagactttcacataggttgacattcttgttgtttgccaaatacaagagtttgtgatatttggaaacagactcttcaagtattccttttaaactatacagattttgtatttcaagtggaaagctacaaaacaccaactctgttttaatttgtcatataaattaataaatttatgtcatgtaaattaataaatttatgtcatgtaaattaataaatttatgtcatataaattaataaatttatagtacttcccctttcagttgaggaagaggacctagcctcagccttatctttcccaaagaggggttttaggggtgcgtatatttgaatgaattttggaatcaggtttttttttttttttgagatggtgtctcactctgttgcccaggctgaagtgtggagtgcagtggtgtgatctcagctcactgcagcctccacctactgggttcaagcaattcgcctgcctctgcctcccaagatgctgggactacaggcacacgccgccacttctggctaattttttttttgtatttttagtagagacagggtttcactatgttgcccaggctggtttcgaactcctgagcttagacaatcggcctgcctaggcctcccaaagtgctaggattacaggcgtgagccaccgcacccagcctggaatcagttttaacagtgtataatctcattggcactccttggactgaagccacttagcattaaaatgtaccttgatctcctggtgacctccagtgacccacattgatgactctgatgggttatcattagttctccccaggaaatttgaatcatcaggatgtttctttggttacataatatatttaacccaggtactggctattatgaaatcaagaagcatatcttcccagaagtgtccttgtgtgtgttcatttgtggaagttggaggaatcaaatctctccctctctttagaggtgtgttttggaatgccctaagcaggctgctgtgacatcagcccttgaatttactctggttctcatcaggaacattaggaataattcctcatcttccatggaagaaggtggaacatgaagcaagcctgaaaacaaaagctttacattggctatgtgtgaaccacctttgctgttttataagttttgctagggggcctgggatagtagtgacacctgaccccttactgaacattttcatcgatgctctttggctctgtggttttatactgcccctttcagttgatgaaaaagacctagcttagctttaggtttctcaaatagaggaccacatctatattaaggaaccaatgtaactacataaagaactgtaagttcatgttcctcagaatcttatgtgtgtaaatactttatgatttttaattccttcttatattatcctcattattgttaacaggatttaatgtggcatgctggaaggagcagggactttggagccagagagccctggctcatatttcagataccagctgggtgactttggtcaagttagcttatttctctgagccttcatctgtaatggaagagtgttcaggtgacccacgtctcatggcttaattagttcctggataacatttgaagtgatctcttttaaattcatagacatttccttggcacaatgttacaaattgcgattctattgcagaaaataattttatgctataaaagcaccagaaattaattttaaaaagtgataaggatacttttttttaaaaaaaacatcaattacagaaagtaagatatttattataaagtctatgttgttaattttttttttgagataatttacatgagtttttggagaaaaatcttcttaaaatatgaatgcattgaactttgggctaaagattagttcttttcctgttaaactctgtagcaagcatgaacatttatcatcatctagcaatcaacaaatgaattcaaaatctgagtcagtcattaaaaagaaagaatttgcatgtttttgaatggtaacattagtgtggggagtggttctgtcttcagagttcccttacttgtacattgtaatgatacctgagttcaaagtcacattcgttttcaaagtcaagcacaatttcagtgatgtacatgatgtatttggttgtatttgatgccagtggtcaattaggctttgtggttttataatgaggcatcattagtctgtcttccttggcaatgtcactattaagaggcattcctaaagcagaaaaaggctgtttcttcacaagagagaattttctcaacttaaaaatgttatctttctctttaatgatgttagctagatttgaatgctggtactatcccatctgttctgttttgaagcagtgaaaccatctttcccttaagctagacatttctttaatgtctcttaccaaacctgtccttaagcatttgaaacctgttctttaatcatttgctaacatggtttggttcttaggcttgctgtatttattacatgcaattatatatgtacagaaacaaatgttccatttttgtatgtcagtgcattgtggtttcttatgatttatttcatatgcctgtgacactagattttcttgaaatatttttcctagtcttttattttacagcactctgaattttaatgtacaattcaacaagttttagtaaatttgcacatttgtgcaatcctcaccattatctaatttcagaacatttcaattactcttgaaagaagtctcatgcccattagcagtttctctgtacccccaactccaggcaaccactaatctgtctacagatttgccttttctgaacattttatataaatggaatcactcagtaggtagcctttgcatctggtcccttttgagatgtatctgtgcttgtagcatgtatcagtacttcattcctttttattgccaaatagtgtattccattctgttgtctggataaaccacattttgtttatccatttaccagttgatagacatttggtttgttttcagtttttggctgtcatgaataatgctgctgtgaacatttgtatacaagtctttgtgtggacatgtgttttcatttttcttgggtggatacctaggagtggaattgctaggtcaggtggtagctgtttcccaaagtggctttgtcagcaatgtatgagggtttcacttactctacatccttgccaacactcactatgtcagtctttttaaattttagccatcctaatagatatgtagtaggatgtccttgtagttttaatttgcattttcctaaagactaatgatgttgaacatctttttatgtgctcatggccattttcatatcttctttgatgatcctagtttttaaaaattgtttataacctaatgtaatacaaagtcagggtccagcatagaaacaaaagttattccacttattttaacagagataattaaatataaagaattgttattaggtataaaattgttaataagtaggtaactgaaaagataaaaagcaaatactaagatattgtagaggtagtggctgtaggaagcagccatcaactgtagggctgggggcaaatagggtgaaatctttattaaatctttagaagcttagaggagaggccccacagagctgaaacccagacctgtgaggtgtgggtgatggtgcagctgtttctgaggggagtgtaacaaggctggttctgtaagtgctgaaaaactgcaggccagattcagctgctgcactagaaggaactgctgctgccctggtgaagaagtgttgctggggatgacactgagagctaaagccagcaggaagcagaggggaaggagctagtctccctctagtgtcccctggtggcagagcctaacagagagccaactggtaaaacagaaatatggtttcagagttacaaagctaagtttggaagggtatggttggagctgggagagaatacctatataattggccagcctacccctttgaatattcagtatctagacctatcctcctaaacatattttaacttccacacaacaaaaactactttcttttcgtctaacagaatataaacattctcacacaaatgaagatgttctcaccagctccctaaaatgcagtgtcacaaagtctcattagtgtatccatctctgggaggtagtcacattacctgttgctgggctttgttaatttctccttaaatttaattaaagttctgcttgaatgttgtgttatccagagttaaattgtagaggtaagtttcaacaatgtttgtataaataatgcaagaagaaggagaagaaatttgttctcgttccctccctccctctccaaaagcaagaaggaaatatgcatatctgccacttttcagtagttgagatttgtatctttcttctcctgttacctgttccttgtttcttttgcactcagccaggacttcaactgattaggtttctgtacctgaaggtctgaattctcagtggtcctgcctttttttggattgctgtggttttccattaacttttgctgttggagatagaagtactaagagctgccctgatgaaggaagccgtggtccttcctgactctttgggaggcagcatcccagggtcctctcacccccactggcagtgtatcctcctcactggcctcttggctaagtggcttgaggagcctagaatgactcagtggcagtctcaccttccagttcactggaaacattgctgcctccctttaatagctcccttaaaatcaggacctctgtactagcagggatgaaaaccaaaaatttttagagtgggttattagggtaatagtgagaggggccactcctacttcttctattgatttctggaccaatgtcttcttactttggggagacaggtgagtcaaagcatgtgctgtgttgtgtgagacagaactccatctttcagaatgttgccttacaactgttgtcttcagtaggctgtgccattcttccgctgggtcacctgcttatagatgatgggatatgtagtgagactggtgaattccaagtgctgagagatggctcagaactggcacattcagtggtttttcaaattgtaggccatgagccacgagtggtcctgaaaacagctccgtgagctataccactttcctccctccctctcttccttccagtgaactctaatagaccagagacgctggaatagcaattaatattgtgtgacacaggttgtaattgcaattgtatttttggaaatatttttacacacatttaccgtatcatgacttacaatgagtttctcaatatgattcatggtgacaatactttgaaagctagaggtctaaagagacatttgaccttgcggttcccttatccccagcctctggtggtttaatgcgttgatttctcggtagcactccacgtggtgttcgcattggctgcagcccttcagtgggcctgagcatgaggatgggcttctgtcaaaatcttgtttccttggaacaaggtccaaagatggccattatgaatgggatcacatgtaaaactcaacttttagggttgtttagaagattaaatgaggccggatgtggtggctcatgcctgtaatcccaacactttaggaggctgaggctggtggatcacgaggttaggagttcgataccagcctggccaatatggtgacctctgtctgtactaaaaaatacaaaaattagctgggcatggtggcgggcacctgtagttccagctacttgggaggctgaggcaggagaatcacttgaacccagaaggcagaggttgcagtgagccgagattgtggcactacactccagcctgggcgacagagtgatactccgtctcaacaacgacaacaacaacaacaacaagattaaatgagaccatgtgactcagttctgtgctcagtatttggaatatagcaggaattcattcccgtgtagcacactgttaaaggtactctgctagagtactctgttagaggtactctgcactgtgctctttatgtaatgtttatctttaggttttacatttaaaatttaaatctcctacattgttgagatgactagactggcctcaatagagccgatttttaaatatgaataaaatttcatatctcctgttaacctttttccatccctcctctgatttttttctccaattggtatttttttcttggatcttgagaactttgtggttaaagcagagatgaaaattttgtgggaaaacatctgcaaaataaatttctttgaatgaattgggatagatggcttggccctcaggtccagacctccctaacataataaatgaaccagttattgaccagacaaaagatttcccttaagtgctctttaattttaaagcagaatagctttaactggctcttgatgaagaaatcatcttaccattcttagctgtcctctcttctgcatatgcagtgccaggagtgcttttgggcatttgctgtgttagggtagtgatatgttttggaaagataacggtattgaaattagggtactttcaagagaaattcaactttggattgatgtaccctctgatatgtgctgtcttgtttttaaagaaacacctttatcaggatatgattcatacatgaaatgattcatccatttaaaatgttcagtggttttcagtatattcagagttgtgcatccatcaccatagtcaattttagaacatctttattactttccaaaagaacactggaccccttagccatcaccccggaactctgctccacccaaccccctagccctagggaactgtttttttttttttttttttttttgagacggagtctcgctctgttgcccaggccggactgcggactgcagtggcgccctagggaactgttaatctgctttctgtctctagatatttgcctgttctggacatttcatagcagtggattcatgcactatgtgatccttatgcggggcttctttcacttagcatggttttaagagtcacccatgctgtggcatggatcatacttcattttttaaaagttggtacataatatttcattgtattctgtagttgtttatccatttatcaattgatggacatttgtgttgtttccaatttttgtttattatgaacagtgctgctaagagcattcatgtataagtttttgtgggaacatatattttcaacgttgggcatctaggagtggaattgctggatcatacggtaacctgggtttaaccatctgaagaacagccagactattttccatagcggctacgctgttttgcattcccagcagcagtgtgcgagggttctactttcaacacatcctcaccaatacctgttattttgattagcaaagccgatcgaattggtataccaatccaattgctacaccaatacttgtctttttgattttagccatctagtgagtgtgaagtgaaagctcattgtcgttttgacttgcatttccccaatgattcttcacttgcttattgtcatcttttttttgtcctatctgttttgttttgtttttgtttttgttttctttttaatatggaatgcttcatgaatttgtgtgtcatccttgtgcagggaccatgccagtcttctctgtatcattccaattttataatagtatatgtggtgttgaagcaagcacctatttgtttttaattgaccgggagggatagcaataattgtaatctgtccagttcttatgtggaggatagtttctcctacatttccccacttctttgacctaaattcacataaacgtcaaggaatgtttgattgaagtaacactcttttaaaacctagttacagttaagtcataacccaactggctgtatataaaagagagtcttgtgaaggttcagaattttgtgtctttgtgaaaagaaattaaaaccttgtaaggagtcagctaaagaatgtaaatttttatgagcttctataaacagggaaatatggaatgtttagttccatttaacctgactataagccaggacaagagagtacatattttattttgtgtctttttacactgcttttaaaaaaaataggactattttgaaaaattgcacttcccctcctatattttagagaggtaaccacattagtatcattattacttttgattaatctaattgaaaatctcactaaattgcaatagtttttaaaaagtcaaattcaaatcttatgtgtgttttatgttttcctcttcgccctcaaggaatatttcttcatgttgagacagcatttctatactgccacaatgacagtaaaagacttaaaacagtcagctgctaaaatgtaagataaaagtaactgatgtatgtagaatctgaattttagtctcttcacatgttggaacaacttttcaacagccataactccatatatgaagaacgtgaacagtttcaagggtgcatttgtatgcaagttatactttatatctcttttattgtttaaagtcagtataccctgccattaagtgatctttttgggtgtctgcctaaaatataatttctttgggaatggctggtggaggccaagaagaggtccttgagttctgacttcattatgccattgagtttgtcctgcttccttgttcttcatccagtgtctaatttacagtggggccatgggtgcttcctgcgctcatgtgatccttggtgccatcagcccttgcagatgtgttcactgatgctagacggctttgccaatagatgtgctgtttggcagctttttatgtttgatacagcatcagcatttatggatttattggtttttctttaaagaactgagctccctaagaaaccatggttttgctccatgacctcctgtaacagtaatttaagttgccacttctggcaggttcctgagctgaggggtcagttggacctgtgtacattgtatttgttcattcgtttcatggctgtcaatgaaagtagtggaagttgtctatgaatcagaaatttaaatctcaggcatctttttttctgtgatgctatatagttggaaggtttttctaggaagtgcaatgcagtcattcatcgcttaacaacagggatagttcctgtagcttatcttccctttgtgaggggctgacaggccaatggagagaggacgagaaaagaccagttaccatcctcgtttttctggtcttacacctcacctgtttctagaagtgataggaaaacaatgcccaacaagttggttttctatttttaaaaaatatggaaagatacctgtaacataagatttatcaccttaactatttttaagtgtacacatcagtgatactcggtacattcacattgctgtgcagccatcatcaccattcatctccagaactttttcatcttctgaaactgtaaatctgaccccattaaacactaaccccttatttgccttctcccagcacctggcaactaccatgctactttctgtttctatgaatttgactattctaaatacttcaaatggaatcgtgcagtatttgtccttttgtatctggtttattttacttatcacagagtccacagatttcatccacgttgtagcatatgtaaaatttcttgcattttaaggctgaatagtattccattgtgtgtgtagataccacattttgcttatctgttcatccactgatggacacttcagttgctttcgccccttggctgttgtgaataacgctgactattgtgaataatgctgcctatgaacgtgggtgtgcacatctctcttcaagtcttgctttcatttcttttgtgtctattcccagaggtgaaattgctggatcatatggtaattatgttttattttttgaggaattgccaaactgctttccataacagctgcactattttacatttctaccagcaaataagctgtttttcttaaatgtttctcccttttgaagacctgatggattgatttttagagacagggtctgtctctatctctcaggctggagtgcagtgccacagtcatagctcaatgcggccttcgattcctgggcttaagtgatttttctcgcctcagcctcctaagtagccaggcctacaggcttgtgacatcacatccagccaattttcaaatttcttttttttatagactggggtcttgctatgttgctcaggctggtcttgaactcctgggctcaagcgatcctcctgcctcagactccaaaagtgctggaattataggtgctagcatttctggctgacctgtgttattttaaaagctatttaacttgatctcctaccagaaaaaggaagattctctcatttcttttgagtgactgtggtctctgaaagacccccaccgtccctccctggacgcttgctccttggagctaggtctggttgtttccacttcctttcacttggtcactcattgagcttgccagttgttagagctgcccacaggaactgtttgccaccctgacattctggcaccaacctggagaaacctgtgttcttttgcgttctctacttttgagaacatttaaataacactattagcaacagacctgactccaatattttacgtggtcataactttagggatatatttttagcaaaaatattttacttcagagtggtccaggcagaaggagtacagccttgagctcttgcaggggtccaacaactcctgtccacactgtgccctctggacctgcccgtcacctttgttcacttcaaggtaactggcactagacatctcaaagtgttctaactctcttgtgtattgagatggggaaaatagatgatggataaatttaaatatgcaataagtcgaaattttgaagattatgttcctgaaatgcaccatggtaagagttcacacttttatttaaaatgtacttatttaataatactttcttaatttccattatttaaagtctttttttaattttaagttctgggatacatgtgcagaatgtgtaggtttgttatataaatatatgtgtgccatggtggtttgctgcacctatcaacccgtcatctaggttttaagccccgcgtgcattaggtatttgtcctaatgctctcactccccttgtcccccaccccttgacaggccccggtgttcaactcccacttatgtatgagaacatgcggtgtttggagaaaaacctgtctctaatggtcattgctgaaagctccactccttattttacaagctatcttaactcttttttcatgtttcaacatccccatttccctcttttttttttttttttttttgagacagagtctcactctgtcacccaggctggagtgcagtagcgcgatctcggctcactgcaagctctgccttccgggttcacgccattctcctgtctcagcctcccgagtagctgggactacaggcgcccgccaccacgcccggctaattttttgtatttttagtacagacagggtttcaccgtgttagccaggatggtctcaatcacctgacctcgtgatccatccgccttggcctcccaaagtgctgggattacaggcatgagccaccacgcctggccttccctctttaaatcattttttcaacaaaaataaaatttgttgtttgaatttgctatatctgaaattctcatgtatttgaattttgtatgagatgcttgtatttttagaagaattaccctacttttagtctcattatcagggaagaaaaccatttaatttgggacaaaagaagaagagagaccagcatttattgagcatgtggtatatactaggctctgtgccagatactctaattacatttgattatattgattggttataaaaggaacgaggcattgagagaccaacttacataacatttctttgctcagcagaattcactgccttgatttatgaaatatggactgtcagatatggaagtaaacttttcaaatggactggctatcataatggcatttaaatagaatgaatgacgtgttagactgaattctatctgtcctccctttacttagatttggtgaagtgtgctgtatcatgtatgaggtattatcattatgtgagatcttcctttcagccactgcagaatggagagaattcctctcctttcctggcctcctaagatagaccccaggtctgatatataagtagaagacttatatctgtttgaaatacagtattaattccagtttatagttctagattttttaggtgtcactctagattcctcttttttcacatgtttctagaagagtagtaaatacgtctaccaatcaaaataatttgtctgttggaatacatttaaaacagaaagtcagcaaagagagagctgtaggtgggaacagcagctgcagatgcttaagctttgcaggagctcaaagcttgggacctgttagctatggtctcaggctgcatggctgaggtttgttatgaccaccaagtgggctggcaggtcttaacctgaatttattttctgtgcgggctttctggggggttgtgcagcctggagcccctttcccaggtctaaaatgcacaccctgaggtagccccagccacctcccatgttaatgtggtttagtatattgctgagaagtgggaccaaaacaatgttcagaaattgttgaatttatcaagcaaggtgctgttttaggttacacagtaaatcctttgtgaagtataagacaataggtacttacatatttctagcaatttcttgttgagttctctcctgttaccttatttgaacttgacaacctatggggtgggcagagtaggtgccattctccccaccctcattcttaaattttttttattttttgagacggagtctcactctatcacctaggctgaagtgcagtggtgccatctcagctcactgcaacctccacctcccaggttcaagtgattctcctgcatcagcctccccagtagctgggactacaggtgcacaccaccatgcctggccagttttttgtatttttagtaggattggggtttcatcatgttgcccaggctggtctcgaactcctgacctcaggtgatctgcccgcctcggcctcccaaagtgccaggattacaggtgtgagccactgtgcttggcctccccaccccgattcttaatagcagctttgagatagaattcactgtcagggccactccacagaaacgggatggatctcctccacttggccacatttgctttagatactgagtcagctgacatcacacccaccccaagaggatgtgaaatataatgaggctttctggggagaataggacagctcccaagaggtcctaaaatggcttgagagagcagggaaaagagactggcttggctttttttggtgatgattattgggggatggtgtggagtgagggttcccattgaagggtttgaatttactgttggtgtcataagagggagccacctggactttcctctctgcctgcccagatgtggacagaaagggatgaaggaggaatgaggcttcaaagcatcacaagtgtagtcactttttaaaaattacattcacacgccataaatgtattcaattcagtagtcacagactatatgtgtgtatagattatatatacatttgagaatatatattagaaacactttaatttctgaacattttcattaccctaaaaagaaacctcatacccgctagcaatgaccccatatttcctggtctccctagccctccataatcactaatctgctttctatctctctggatgtgtctgttctggaaatttcctttcagtaatacaatatggggtctttggtgcctggcttctttccttcacataatggttttcgggccattcgtgtagtggcatgcatcagtactttgttcctgcctgtgattgaatgatactccattgtgtggatgtgccatatgagtttgtcattttaaaggatgattcatttggaacatctgagggtgagatggtaggagagtcaggtgtcagtattagcaggagaggaagacctgggcctgcatctcaaaagggattcaaaggcagacatttagtcttaggagctgtataaattagaagtgacatttaaagatgggagagtaaatgtgatctccaaattgaaatatatactcttttaggtggctacactggttgccaatagataccatccatctattcatgtcctctgatgaaattcatggtaattttcaatttagaacaactcaagttcattctgatacagaaaagtcagtgaaaccaaacataccttttgaattactcattttgtcttgcttctattatcatgagacctgtttctgaatacttcactctaaatattttctgttgcttttcaagagcccactaattttgttggttggaaaatgactaatacttaaaatttggcacaagttgcttcaatgtgtatatgtcttggtccattttctgctgctataacagaataccacaaacagggtaatttgtaatgaacagaaatttattcgtcccactattctagagtctggaagatgtaagagcatggcagcagcagctggtaagggtcttcataccacatcatcctgtggtggaaggtgaaaggtggaaggaaaagagaacatgcaagagtgagagagagaaaggggactgacctcattcttttattagaaacccactcttgagaacaccattaatcagtgaggctctgccctaatcactactggaaggtcccacttcccagcactgtccattgaagattaagtttctaactcatgaactttgggggacacattcaaactgtaacattttattaatttatctccagaaaacattgctttttcctttgaatgagttaggaaattgtttcattctctcttattgtttttttaaaatttagcttttacttttatttatcttttttagctttattgagatatgattggcaaaattgtataaatttaaggtatacaatatgatgatatatgttgtgaaatgattaccacaattgagttagctaacacacctattacctcacttagttaccttttttctttatttttttgtggtgagaccatttagaccaagcttgtcctacccgcagccctcaggccacatgtggcccaggctggctttgaatgtggcccaacaaaaattcgtaaactttcttaaaacattatgagattttttgtgattttttttaaagctcatcagctatcattagtgttagtatattttatgtgtggcccgagacaattattcttcttccagtgtggtccagggaagtcaaaagattggacactcctgatttagactcttgttttaaacacgaatggagggttctaaaagtaaatcaaacagcatataccagcagcttccaatttgcttggttatttctaattctcggtaaagttcaaacgtaatcttttgtatctcaaataatattccctggcttctgcaggcaggatgtctaaaatatgtcataacaataacaaattaattttacatttccaggtactctctttatttctgttgaatgaactattgcttttaaagctatttctcttgctgtataggagtcaggttaattggtagattttctgaattctcaaaactgacatttaacttatgtgtttagtgttttatagtctccaatattcagtttctgggtaggtgagtttctagttgtttatctgtcagcattgtgatttcgcatgaagattctcctagtgtcacaacttgggtgtaatcttgaaccctatagctctgttttcacagaatcaccctttggaagtggaatgctctagaccccagagggtcatcctgttttttgcatgtggccaacatctccccatctttgatcttgtacagctatcagacacactttgcataaaaatacaggagagagaataagcctagatttttggttttctgtggggcccaatggctaaactactcatagaaaacagacattatgggatcacgtgcccggatggtattccctacaggtatgattttactacatgcgtgggtttacacagcccccaggtactcagtcagttaattcactctaactttcacatctatagagagaaatgaaattatctgttgccttgtgaaataaggaataatatcagagcagattttaaaagattgatcacttttttcctagttacatattgtggctgggaaaagttttcctgtatgtgcagcatggtctttttatatagttagcctttcattgttgaagaaggaaaatggcaagagtcaacttggtatcatatcattgacaagcttccctgttagccattcccagagattcacgtgaggtagtgtagtgtcactgagttcagtctacagtagaaggagttggattacttacacaccaaacataatcatgctgactgtgagacctcagcatgtatttcccattgcatactggagtgctgcttcagaaggcatgcatctagccagactgggtagccctttattcatgttctcatttgcatctttgggtaccagagacgggagaatccttttaagcagtgcaatcttgctagccctctctagcaaagagtagaggtgggctgaagtcaagatcgacacagcaatgttgtgttcccttgtggtttgctgtcagcaagctgttatccatacgtgcaaaagattgtttgaagtgggcttgcatgtgtttccatagcagcagtcatcttagagatttcactcgttttttggacttttttttttcctttgcttctctgtttcccgctgatgcaggattaaataaacagcatatttaggtcaaggaaagagatgtttgctaatatagatgctaggctaagcattctgggagagcgatttcttgcagcagatgaacattctttgtgcctcccagcagcatctgcagcagtgtggctgtctggcactgtctttttcattttgggcaggttctgagattcagaacaatcccaagcaaatcacaggagccggcagttttccagtagagccacatgtaaatctcctgcttatttgttctttggtattaagagtgaagcaatcagctagaaaaacgatactttaaaggtttggtgcatccgaggtgtgtcatcttgtgtttgcaccacccctcctgttttacactcggagtctggattttttgtcaggctgttgagcaggagcggattctagtacggcagctcagagcttcccttctgttccagtaccggtgactgcttgtcacgaagatggtacagtgggagcctgtttcggaagagccaaggaagaggatgtggaaatggagtagagattgctaaaaaactgaacatccacaccttggggatgggttgcactactagtgtgattctgtttaaaggcatccgcaccgtttttgaaagaaactgtgcttatatgtgcaaacagcaaggagagaataatgcccttgaatatacagcatacaattggacaaaagaagattcagaactattgatctcctcctggctggtaaatgctatcttgcttaattaacaagtagtttaatggtgttagaataaactagtctttacttgtaaacaaatatatttatttaagtgtacttatatgtatgtagtctgtgtgtataaatgggtaattagtggccttaagtttaaattatgaagtgagtgtttgtatgtgtgagaatgccatgtattcatcaaagctaaatacatacagagaaaggaataagatattttattaaagaatagttttctaatgtagctttatcagcttacatgttcttggtatagtcctagaaataatatgtggtaaagtgtatatttagggtattatatatgtgaaccgtctcccagttatagtgaattatttagcccctttacattccagtcttctagttggccaggtttttcttactaatggcttatggccagtccttgatgcgggggggagaaatttaaagggagcatgaaagaaaactatgatgggtatgagacaaatatttatagttttatttttttaaaaaatccagctacttaacatgttttggggtgaagggtcttgagagcgagaggaagtgcagtttgacatgacacttccgtgttctgtccctttatcaggcatgaagaggtgtcaagtcacagatgggtgtgcctcttgtggccttcccaccagcaccaggtttgtgaggagccacatatgggtctcctcctctctcaggatgccttgccatttttccttctgttcttctcacagcttttgtcaaaatgagtggggacaaatatatctcagagtttctgtgtgtgtcttgccagcagctgcttggtacagcgaagcatgcagaaatgctgagacctttcccggctggtgaggctaccatctgagactgagaagggggtattggcatgccatatgcccttgtgatcagattgggtggtcccagcctgcgggaacccagagagaggatgcattttatggagggtcttatgttagcactcgcaatatgtgggaggaagaaaggagagcatcactcaaggcatcagatgcattttgcaagtcagtgttatgtatgttggaatttaagtggtgctatattaactgttaaatattttaagctctgaggtattttggaatatgcttttgcgaataactggtatcagagattagaaggactagctccttgtagcgctctgttccattagtgtatccataaccagacagcccgggacctgcttgggccagtaatggcagtgcccctcccatgcggcaagcttctgctccctcagaccagactgacttgtctttggttaacctgactttaagggattctgcttgtttttcttttctcttttattgcctgggggaagagtaacctgccaggggctctgtcagagctctgggtctgggattctagaacactgctgtcatgcatcctgtcggctgctctttgcccaccactcttgcctgcaccagcaggccgtctgtgcatgtggcagaggtgctgctggatggaaagatgcgccctctcactccacgcttgtctctctgttggtgtcgttgccctctgggacctcttctgcacgcagcagagtggccctctgaaaacgagtcagaccatgtcactcctctgctctggaccttctgcagctcagggtcaaatgcagaatctttacagcagcctccagccccgtctccagcacttcctccttctcttcacctgtgtgtctgtttctctgctgctcattcctcacctcgttctggatacccaggctgccttgctgtttctacttcccaggacatctccaccagggattgcaccattcattgcgtggcctttgctcagacccccttctcagtgaggctcctgtgaccccctgcttaaccctaaaatgccccggcacacctttccccagatcctgtatagtttcttcttcacctgacgtattctttgtccagaataacagcataagcgtagtaatagtaattagtagtatgtgttactaggagtacacttatagtacaacaagaacaagattcatggccaggtgtgtggtggctcacgcctgtaatcccagtgctttgggaggccaaggcaggaggattgcttgaggccatgagttcaagaccagcctggacaacatagcaagacctcgtttctaccaacaacaacaacaacaaaataatcagccagacatatgttgacacacacctgtagtcctagctactcaggaggctgaagcgggagggtcacttgagcctaggagttcaagtttacagtgagctgtgagtgcaccactgcactccagcctgggaaacaaagcaagatcctattgcttaaaaaaaaaagaatcagattcatgatacctgggatttttgtacgctttattcactgctcttctcctaacagctagaacagtgcctggctctatagtaaatgctcaatcaatgagggaatgctgatgaaatggctttacggtcctgaacttgaacttggagaaactactgagaagattagttaaaatcacttattctaaagccaaaatgtgtgtttttttaaatttttagtttccccaaacagtaactggctctctgttaatgatctctctgagcctgttgaccattccactccctagaggtgtgcttctaacccttctgtcatggttaccaagaacacacaccaagaagttgtgtggttcatggttgaatgttccctgggcttgcagtggtaatgactgacaattggatattgtccagactacctctattgatgacgcatttcttaagggagccctgcccattggtacttccttgggtcacccccatgcaaagataggctgactttatcttcatatgtgggtttgcaccagggttctcagcttgggtaggatgtctgtcctacctccagctcaggtggtggctccagcctgtgattctggcttaactgtcatcaggtaagagctgtatttcacctgccctcagaaagcaaaacccctacttcagctactcagtgtgcaccaagcctttgtggagggaatgtaacattcatgaaggatggcctaaagggctcgaggccacccattcttctgaagaccctagatgtcccaaatatctatccatctgtcagagaaccacatgcctggtctgcctagtttgtcctcagtggaatttctgtttctgatctaagctttgtgatttttttcttgccctatactgaagcacgtcataagaaacatacttaagaaaatggaatctactataaggatgttattgagggcattgcttacttgctattggaatggcaagaggcactgtagtatggtggttaagagtgctgattctgggctgggcgctgtggctcacacctgtagtcccagcactttgggaggctaaggcgggtggacagccaggagttcgagaccagcctgagcaacatggtgaaaccccgtctgtacaaaaaatacaaagattagctgggcgtggtggtgcatgccaagtagccccagctacttgggatgctgaggctggaggatcacttgagtcctggaggttgaggccacagtgagctgtgattgcaccactgcactcaagctctgttgacagaaggagaccatgtctcagacaaacaaataaacaaaaaaagaatgctgatactggagacagcctttggggtttgaatcctcttaaattcacaacttaatagttgtgtgactttgggtaatttacttaaccactctgttcctcagtttccttatctgctatttgtagataataatggtacttgcctcatagggctattaaatgagtgagtatgtctaaagttcctaggtgattgtcttgcacataagtgttaattgttagctgttataatcattgtcatttctgttttttggtgttccttttatgaggagccctggaataaatttcttctcttcataatatgaatggttgtgcttttcatgaggaactactttgttttcattttatatacagtctggttcatgtagctgatcccagccaagtcatcagttaactgttaaagcttatttccaaacatatgaccaaattctagcaggttctaggctttttcaaaatgacttttatattgcccttcaactttgcttatttttttatattacctgccattttatcagtctgctttttatcatctgcttattaaaatacttttaaattttattatgtatatatgtaaataactttaaatccttttgaaataagttacaatataaattaaaaggtaaggccaggcatggtggcacacgcctgtagtcccagcaccttgggaggccgaagtgggtggatcacttgaggtcaggagttcaagaccagcttgaccaacacggtgaaaccttgtctctactaaaaatataaaaattagccgggcatggtggcactgcctgtaatcccagctactcaggaggctgaggcaggagtgtcacttgaacctgggaggtggaggttgcagtaagccgagattgcaccattgcactccggcctgggcgactgagtgagaccctgactcagaaaggtaaaaaggttaacagagaagcatatagtgaagaaaaagcctttttaccatcactaaggatggctctgaagtaacaaacagatgtcttgagtgcaggatttagctttgtaaggctagggctgttcaggctcctactggaatttatatttaaacagtgaatcagccatatggtgggcgctacattaggagatgtacttctctggtagttggggacaggctgaatttcaagtatagacacctacattttgactagtaattctaccacagttgagggacaagactgatttgggaagatcttattcctgagtgtagatttttcctaaagtatttccccttttcggattaattgactgtgttagttcaactcatttaggaagcagtcttgattgcttatgtgtgctgagtgtacaaaaatgatggggacgctgacacatgggacacgcaggtactgcctgaggacaggaaaggatagctcagcctagaatctccagtggaggttcagaaggaagcttgggctgaaacaaaacacattgtcaattcaatttttccttgtctaggcaagtttgtgatggggctagccttctggctaggattgacctattttactcatagctaccaatatcatattccacgtcaagtagctgtggaagaattgaagagctgatggattattctcaacatgttctgtttttgccaattataactgaagtggaagaacttgctcggttagaactttaacagcagctaggaccctgtcagctgcttaatgaagagcagtaatacaggcaaagtgcttgtcacaagaggagaaaataaacttgtcttcagtttcttttgtgacatgttgggataatgcagctgtaattttacccattgtaaattaatatttctctctctttttttttttttaccttatggccttaaaaccttaaagtttttcatgtctctgtcattacaagatttcctaactgtcttcaacatgtcttcatactttagtactatataaacttttatcagaccactttaatctccccaaacagtcccgaaggactaaacagtcttttctaatgagaaaaacctaccggctatgaaaaaaatcctttaattgatcatgtacttatttaacagtcatttgttgaatgtgtgcactgtgcaaagacagcagagttgaagatgatacgctttctggcccctgaaagcccccatcctgcttgtgtgtctgtgggtttgggggtggggacaggtgggatctcgggggctggctgagaggtaagtgaataatcagtgacaaggtatgtgaaaatggaataataatacctgttagctggaggcaggcagggaaagtagaggccagatcttgattatcttaggtgttctcatggctttttcttgtacatttatatcggttttatctgcctcgaggtgtcatgaaggcccggagcctgcttggctgccttctagtgccagaatactccttgggtccaagtctggtcacagcaccatggtttgggtaggctgttttccattttagttctaatatttttcttaatgatgcccggtgggttttgttgtctgttttgatcacaacagtaaactaggctgatgttttcaaggaacagtctgctctgattccttgatccatttcctgtgtcataactaagattgccctgctctattgtggctgcttttgagtgcagccaatgtgtgtgagcacgagagagggccagacctttccccagaactttgttaaaatatactgtcttatttatcagtgggattcctttgctttaatatttattaaagtataaactagtaatgcacacttattgtagaaactaagcatgccagtgtccaggaacacagagacaactgctgttttaaacattttgagacacaacctttccagatatcattcacaaataccactattcataaaaatatatgtaacaagttgcaatggactgaattgtgtcccctacctccctattcatatgttgaagctctaacccctaatgggactgtgtttggcaatagggtctttaggaggtaattaaggttacgtgaagtcataaaggcggggccctaatcttatagtactgtggccttaaagaggaaatgatcctcctgggaccccgccaactcaagtgaggacactggaagaagccaagatagccttcaccaggccctgaccatactggcaccctgatctcagacttccagtcttagaatggtgagaaaatacatttctgttgcttagccacccagtctatagtattttgttgtagcagctttagctgactaagatacaagtagagtataagaagaatgttgttatgttatatagtcttgtatcttgctttcaagagactccacatgggccgggcgcggtggctcacgcctgtaatcccagcactttgggaggtcaaggcaagcagatcacctgaggtcaggagattgagaccagcctggccaacatggtgaaaccccgtctctactaaaaatacaaaaattagctgggtgtggtggcaggcacctataatcccagctactcgggaggctgaggcaggagaattgcttgaaccccgggaggcggaggttgcagtgagctgagatcacaccattgcacttcagcctgggggacaagaatgagacttcgtctcaaaaaaaaaaaaaaatatatatatatatatatatatagagagagagagagagagagagagagaggctgcacaatatatcataaacatctgttcatgtcaatgaatggacatttatgtctcattcttaatggtgtcatttcattttacagatgtaacattttatttaacctataccttctcttccattttcctttccaattataaatgttgtgataaatatctatgcatatatactttaaacatttatacaattgttttcttagcagatttccagatctggagtagctagctcaaaatatatttacttgttaaaggattttggtatgtatagccagactaccctccagaaagattatttggagatttttaaaaattcaagataagaaagtttgtgttcacctcttctgacttcgagcagtttgttttcatcattgctatttatgaagttgatgatggggtcacctgttgaacagaatacagtgacttagattgctgtatacttaggcaagtaacacagtcatatcagggttcaaattagcactaattttgcctctgcttctggaagcatgatcatgagcattcttaaacatcccaggagagttctgaaatgttccattgtgggggctggaatgtgtttgttctgagaggtcttcacccttttagagttgatatagctatttcatggatattcagaagtaaagagcagcagcagaaatactgagtagaaacagatgaataaagctgctactgctttgctgaagttgatttctatttctcccatggccttagtgagaagcagtgacctttttgctttttattttttaatttttaaattaaattaaatttttatttttattttttttgagatggagtcttcttccgtcaccaggcttgagtgcagtggtgcaatcttaactcactgcaacttccccttcctgggttcaagcaattcttgtgcctcagcctcccgagtagctgggattacaggcacgtgccaccacacccagctaatttttgtatttttagtagagacagggtttcaccatgttggccaggatggtcttgatctcctgacctcgtgatccacccgcctctgcctctcaaagtgctgggattacaggcgtgaaccactgcacctggcctaaattttatttttttgagacagggtctggctctgtcacccaggctggagtacagtggtgcaatcttggctcactaaagcctctgcctcctgggctcaaaccatcctgccacctaagcctcctgagtaattgggactacagacaagcaccaccatgcctagctaactttttgtatttcttatagagacgggttttcaccttgttgtcaggttggtctggaactcctgaactcaagtaattcacccactttggcctcccaaagtgctgggattacaggtgtgagccaccacaccccaccatgctttttgctttttaaaagtaacatttgttgtcttttatatttagaatacataagtactgtagaaaatttagagaccacaaagaagaataagaggaaaacaaaaattacccataactcacagcccagaaaccaaaactgcttaatttgtggtatgtgttttctgatatttttctctgcttctgcaaatattaaaaaagggataattgtccataaaaatttctgatgcatttttcacttactgtattttattatgagcattttcttatgcccataaagttctgctaaaacatgatttaacatatgtatagtattccattgtaatatatgtacgggaatttatttaaatacttctctgttgttcagtatttaggttgttataaatcgagattacagaagacatctttacccaaaaatctgtgtggatctatagttatttttgtaggctagatttataaaagtgaacttgcgaagaatgaattttttaaaggcctattaaggcatattgttttattgtgtgatgactgatccaagttacactcctagcagcagggactattagtgctttttttatatatgatcctggctagcatcatttttgccagtttgagaaacaaaagataacacctttcaaactctaaatccttcgttatcttcatcacgtgtttctctgttttgtcatttgccttttgattttgtttaatttctttatggtacttattttactaactgaggtttgaatgtaaatggtatacataaccatcttttcctctgtggtttcttccattacctttatgcttagaaattcttgcctatctgagatcagatattcaccagtattttcttttggaatttgtttgtttatttactatttgtcttttcccctcagggttagcagactaagtctatggggcaaatctggcctgctgtctgtttttgtaaataaagttttattgccacatagccacatttgtttttttatattgtccaggcctgctttaatggtgctagagttgagtcattaggacagacacttatttaagtcagctgataaagtcacctgataaatattatcagctgacctaaaatatttactagctggccctttgcaaaaagtttgctgtgccctgctttagtagatttagaatttatttggatttatagtttagttaagatcctaattcaatttcctacccatttttcccagtcccatgttgaataatccattccttactcagtggtttgtgatactgcctttattatattttatgttcttttatatactaggctttgcaacaattggaagaaaaccctaaggccttttcctttttcccctactccccatttttttctttagtgttctctgtgccctgcaaaagcaaggttcttatacagctgtcagtttaattgcaattcaggaaaaatgaaaacaagaaatttggggagagacataaattctataatttaaagatagaataaacagactgtactgcgtaagttgctgaattaagtgatcttatgagacatattggttaagattcaggagctaagggttaaggtttaagtgagcagttaattatatttgtaggtttgtttcctcagtaaatagcctgttcataaaatagatcaagcttgtctttatgtggactctctggggcattttgatgaaagaaaaattccagcgtggcagctgcatcctcaagtaaccttgatttgaatctactctttttttttttttggtatatccggtctttgctaacaaaagaagtcccagcaaaatataagcaaaggtgctagcagagtttccaaacaaagtctattcatgtctgcaggaaatatatctgtacatttatagatgaagagtacattctggttttccttttatacattatacaaattctaaggataattaatttccctccttaactagattttatagtgtatacgaaggtttggatatgaatatgtgtgtgtgaagtacatgtgactgtgtgtgtgtgtgtgtgtgtgtgtgtgtgtgtgtgtctatagttttttggtcaatgcagtactagaatattgaataaaggtgtactttactatttttcaaatgtcaatgaacaatgaatgacctcatcctaggatacgtttcaatcagcatttgtttctctgccaaggaaaaacacatatcctaggagactcaaagtagaaatgacttgtgaacagaagcagagggaccacttggagccaattgccgatgataggtgttttctctgcttcttgagtaggttctgcctttgcagagtctgtggagtgagactgtttatgggattctcagatgcagtcctgtatgctaaatagttttatggatgtttggtatttcctgtatattttctaggcttaagaaacaggtaacaacattatcaaagactcagtcttgtaacttattatttccttgtgctttctttattgttgaagaacaactggaagagaatcctgaggtcttttccttgttctcccccaacctcccatattttcttcagttctcagacatccattggatgtttgccaattacagggtggtatgatatgaaagagtcataatctctgctctcagagggcccataaggctgccacgtgggatatgggccatgatgggggtaagcacaggtaccacaagcacctacgcagggctccttgtagaaggatttaaccaggtgaaggagaaggagagggacgtttctgcagagggagcaaagtcccaaggagggagagctgagggctccttggaactgctagtaattccacagtgctggagggggcttatcaggctgtaggacaatggtgggagtagaagggtgaccagtgaggctggagaggtaagcaggggacatatcatggtgggtcttgttggaactttattcctgtattagagggaagccatttagtgaaggttttaaagaaacatgttcatgtttttaatgaatctcatactgtacttatcctgcagggtggataacggcttagagaaaggagaggtctcaagacaggaacactagtgaggaggtcattggggggtcacaggtgatggtggcctgaagcaggtggtggaggagatagaagatttaagagagtgttaaatgagagatttggcagttaaataagagacaaggagtcaagagtgttggtatttgtgccctgggcacctccagggtgccacctgctgaggtgggagcactgaaggaatggatcaggaagaattgggaaaggaggatttcagttccagacatcttgagtttgaggtttagcgcatcacaacatgtaaaccagtgggatgcgactagtaggaccatagctagagtgtggatcccagcacagacagatgtctggtaatgaaggatggaaggggatgagatctcctggtgagcgtattcagaaggcaaagagccaagggccctggaagggacaggagaaggagctgggaaaggagcctggagctgagtgctcagggatggggagagcctgctgtgcatctggaaacagaatcttagctaaagaaataaatgccaacggcttgaagacctctgtctgagtgtgtttgtttaagcctcttgcctctagttcaccaacaccatcatctttactgtccgcaggaacatttaacaaaatatgttatgtgcacaccatccttttaggcacaacagaatttcaaggtatccccttggcctggaaggggcttgtgtagtagactggggaaagaattgatcattgaataaaaccattctcttcttctttcccctcccctcccctccctccatcagaagagcagacttctattgttaactagttatcatgccgtttccatgtctatttacttgttccatccttatgacaaccccctgatgtagaaactgtggttacctttattttatagatgaggaagccaaggaacaaagaaaagtgtaaatactgtttaaaatcacacagcaagtgagtaggacgggccaggattcaaacctgtcacttagttccagagccctgtgtgctctttccctccataccacagagtcctgcgtgtcagctgagcttagcagaaaggtgaagtcaggacagtgcatggaaaagttctcagaaatgagcaaaccccacgacagtggaagagtgagaaaaagatgagacaaagttgaatggggagcctggtctagcttgggaagcaaaaggtaacattagtagaaaaaagttgctgaattccatgagcaaccaaaggctgtgtgaacccactgaccagggaccgtggagaaggatagaagagaaggtgacacctgagctgggtttgaaggatgaacacagatgcctaggaggttagaatgtggatgtgggtggggaggacgttgcccctgaagggagtagtgtgttctgtgatgctcaaggaagcctgagaagctcagcctttggaatgctctggccatttgtgcagagctgcacacgtgggctgagaaatttatgttcaagcctgaaggcttgcagggcccctgaggggtgatattagatcctcctctcacatcagagtgggatcagaatcagaaagggagagacagggagagcaggagtgaaagctctgatcccccacacaaaccctgcgaccaaggggatgaagggaaagggtcaaactagagaatttttatagatttactttttactagaatttacttgactgatgcacaatggaagtgaatgagggagcaggggtaacagtgccccatgccccatcttctgactccgtggtagtggtgcccttgatcagatgcaagcgcagaggaaggacggatgtaagcgtaggtggggagtggggtagagagatcgggagctcactcttggtcttgctaagtttgagtgcttgaggaactttcaggtcaaggacagatccagctttcatagggccctaacattcttgccagttggaagtccctctttaagaaaacaaatagaaaattacaaataccaagtgaggtacgagaccatagggggagcccctgcaagggagcatgcggacgcttgagcttcgataacttcccagcctgctcctgcctcatggcagatatctcaggctgtcctgtcctctttcatgtctccatgctgtgtcttccttggtgtcagaaaggccccaagtcctcctctctcagccataggcttatcatcttgttttgactgtgagagctaattaagttaatccaagagttaccttagtgtgatgtctggaaagacccatacacctaaggcgtgccttctgattttctcacagaaaaagttaccctgctacctcttctaacacacaagagaaactgaatgaaaaagccacaaagggcttgtatgggatgagggccccagtctgtgatcactacccatggcagaaagaggatgaaaagatactctctccatttagattgtcaacaggacttggtagctgtgtatataatgggcatagcacttccaacttttcctgttattaaggagttctggggaactactttacctaaagtccctcactgagaacaaaattttgaaaccaaatttaagtggtttctgaatagagattacaagtggtttcgtaccagcaagtaaatgtaaggcagtatatttaaataattatccctttactacttgcgaagtgagttcggtagatgggagtggagaagagaaccttagaatcattgtttagtcttcatctttcacagctcaggctgaaggcctttccttgctgagaggtaagtgctgacgccaccagggtaagggtgtatttggggaaatgcacagaagccccttcttgtccttttttgtcctctcttctgctgttgcgccttggcctctggaaccccaaactgcagagccttgccctcccaccctaggtgctcctgagctccactgccactcatcttttttcactgccagaacttaacagtttctgcatgtgaatgacctcagctagatgttacgttcttatctgattgtaaaaaatcacactatggtaaaaatagctaatagacttgtatctgctaaagggtatttgcattttggaggggagttgttaactgagggtggcactggaggtgaatatggaaggtttgggggcattttgtcattcatttccaagctgcagaacaaatggagtctgtatgccagcccatctctgtgcatgagtttcaatttttatttcgagtgaggagaatgattttacctcatttttcttctttcttttttcaagtatgtgacagttttcttgagcaaatttcaaatgtttaactgtggagggcatgagatttttaatggtgtcctaccgtgctgtatcttgccacctgcaagccaccctctactaagctactctgccaagcaagccctcaggaggagaagtttgggaatctagcaccttgctttgaaaggagctgaaaacatcagcagattgcattgctggtcctaacatcctggggccttgtgaagagaggacaggaagatactgctttctcattcagatgcatgacctgctggggttctgcattctgttcagaactgagtgttgcatcttcagaaggacacatcagggcaggagaagactcagagaagggctgtgaaaaggattgtggcatatttataatgagagttggtgataggagccccttctgcgtgtattttctcccagatcccagaatcagatcaggtcatcttgcttttaccaaactgatttagggggtcaggtaggttgagtattaaggcaggcagagccctaaacattttagctactccccaaaagtgtatatcgtcttattgttgctttcttcttcttctttttttctttttttaaccagttctttgccaaataacaaggcagggagtggtcatggtgcctgggaactttggtgcaagagatttgatactgaatttccgttttcacttttcacccttagcattcaaccaccttttggactgggctgttgtgttacagaaggatacaggcttctgtccaaatcatactctttgtgaccagttttgtaaaacaagtggaaacgctgatagtttgtgcagatgcatgtttatctgaaaaatgctggacaccatccaaaggcaaagtatgcaggaatggtcttaattttaaaaacaacctctctgtgcatcagtaatttaaacccttttccatttttataatttttgaatcgccctctttctgttaaaaaagaaacatgaaaagaaagaaacactgaggataagttttagtactgtttatgttgtctgtcctgcaaccccagacacgcaggacttggctcaaatcaggcaactggagaattcaggagaaggccagatgatctggaaacaagcaagggaaatcatcattcaagaaatccttctattaggaaatgagattttaaaagccaatttaaaactatttttgcttttcttgttaaaagaagggttgttttggtatcctctcattagtcaccttccagagagagagagagagagagtgtgtgtgtgtgtgtgtgtgtgtgtgcgcgtgcatgcgtgcacacatctgttcataagctgctcctatgacctgtgttccaggtcacacactcaccctctgaacatgtgaacaagaagattaattagttggaaagactattcaaggaactcagggaatcgccacactgggcttttattccccacatctgcagtgtcttagcctccattgccagtgactctctgaagtttgggttaggtctttttatctcaagagtcaaagggggagatgatacaaatcattgacttcctgtcaccctgttatctgtggttaggtgattcacgtagcaaaagtgtgatccgagcttgcttccctttctccagccccaaggacactatggttggcttcctccaccacccacttattgtgagtttggggttgcaaactaattttgacagtagcccaaagtgaaacaccattaggaagatgagcctggttgctcagacccacagggaaatctggaaggccttggattgtctgtgccttcgcctctctccatgactatatggtaatcattggagggtgagatgaggggtcccaacgagtctgtgcctagactttagcagttggacgattaggggccatgcagcctaatctcagccccatttgagaatgttgctcctctgtgcctgggtgggtgatggattggaagaggccaggtgggtagggtaggggctgacctggaccatgcttcctgtaccacaagacttcctcattcatggatttcaccaagtctcttggttcggaaattcttaaaagggttttggaagcttggtgtgagactctgcccggatcattcagatggaaaccaaggccatgagtgctgtaagtgcatccgaggttaaaaaggattttcgagtgctccacacataattggtgccaggtgtttcccatttgtctctatgcctagacaaataatcagtcttagtggatacccagagggtgagcagagtttgcatcttgagggtagggtgggtcctaccttcaggggcttccacttcatttagtgaattgagacatgtgcgctgtgggtgtctgggtgcccggaccttgctgccctgtctggcttctctgatgatgcatgcctgccagctgccatcacccttgccccaaggctccactgtctatcccggccccacctcagctgttctcatctgtgactcattcacagaggtccaccaagtacagaggaaaagctgaggagaatggcaggtgtcacatgcatgacaccctcaccatcaccctggagatgtttctgtggtttgcagcaaatcttggaagagcagaatggcctcagccctagtctgagaaaatcctcagggcttttacagagatgatcctggggacttaggagaatctgctgtgttggtcaagggtggggctgggccagtgccacactttggcagaacagacctctcgttagctacggggctggaaagcagcatgcttctcagttattctcccagaatccccacatggaaatgttttctattgtataacaaagatgcacaaagtcagggggtgactggagtattcctgaccagccagggctggaattgcaagccagcaatgcacagagacaggaaaataattcccacaaagaacagtgaaggctgcccatggcaatccctggaaatagtctgatgtggatggagtgagggaaggaagtgttgagagaccaacaaaggatatcaaaagagtgggtggttttgaagacaaacctcatttcacatcgctactggtctgctcttctttcacatgtggcaaataggaatctagtggtcagccaggagacttactgtcatgcccttgagagaggtcttctttacagatgtttaggcaaagcaactctgaggtgcggggctcagcaggactgagctggtcaaataaaaggctttagttagaaatttgagctgaattggtaagttcttttttactccaagttttcttattgtttgcctctgggcgtggggtgggcgaaccctgcctgaataaccagaggaaagtgaggtgatccacagagggccacagctcagtgattttacagtgttcgctttagttcctgagacgtgtgggcctgcaggcagcagacacaggtgccctgcgaagcggcgtgttctagggtaagtgcgctgtgagtgtctgctgcacacattgactacacattcgagaagccctcttttccctcttttccactgtcctcttgtagaaaccctggatagtcagcacatctcccaatactcctttcccattcaggttgtgagaggggagcacatgtcttttcttgtcttctttctgttatgccagctgaggaatgagtaccgattggacttagtatgcaaggagtttctttggatttcagaagatccgcatttttggggtaaaactatgctgtttgctttaccattggcagagcaacttacttccaagttattataataagaaatataaacaataaaaccaaggaaggtaaaggattagatcaggagtgcccaatcttttggcttccctgggccacactggaagaagaagaattgtcctgggccacacataaaatacactaacactagtgatagctgatgagcttttaaaaaattgcaaaactcataatgttttaagaaagtgaaagtttacgaatttgtgttgggctgcattcaaagccatcctgggccacatatggccctgggccgtggattggacaagcttggattagattatcccctccaggtcagaaattctttgattttgaaatagattattggaatatatgggtaatgtaaggacctgtaaggcacagtccagttggaatgtgaaatatacatttgtgaagagttagttatataatattagtattgatcttagctctagatggcttacaaggtataacataagtcagctagtgatgaattgctgttagtactactcgggatctggaaaaagatgtgtgaccgctgtcttagttgtgttctgctttgtgccgtggacactgtgagtgagaaggatgggttgtggtaattacgagcagcacttgtattactgagggctccatccttggccagcatcctctttttaggtgatgacattcactttcattgttgtagccaccacctgtctatatgtggtcatctctgtttgcatctgaaggcctatacctcatcccagtgcgtatatgtccatatgccatctgctatttaaagccctttggtggctttccatttagctcaggttgaaatacacaatcctcaatatgcctgccatggctaacaaggcccaatatgatctgcaccgtgcttaccctactgggctcatcgtgtgctgttctcccctggaccactgcactgaatgggccactgttcagctgctcaaagagggcaaactattctgcgcttcagggcctttgcacatgctatttcctcacccctcaatttgcactaactcagccactattcagaattcactcctccttctagccatgtttaaaagtatcttccggccgggcgcagtggctcacacctgtaatcccagcactttgggaggcctagacgggcggatcacaaggtgaggagatcgagaccatcctggctaacacgctgaaaccccgtctctactgaaaatacaaaaaattagccgggcgtggtggcaggtgcctgtagtcccagctactcgggaggctgaggcaggagaatggtgtgaactcggggggcggagcttgcagtgagccgagatcgcgccactgtactccagcctgggggacagagcgagactctgtctcaaaaaaaaaaaaaaaaaaaaagtatcttcctcaaaggaggcttatttaacctgagactagttacgcatcctctacttttctttcattgcacttaacacaattgtaaataaactagtaatcgtgttgctagttgtttactggttgatttcattgtggtctctgagtatgcttgtagaaagcctggtcagcacatctcccaatactccttccttccagcctgcttgctggtgtatatgatgaaccactgtaatgtttttacttcacacgacaccccagcattagcttttcatgagtgaaataaattaatagaaacagtctgcaaacaaagatttcctcgggaacggtgttttgtttctgtcatggtgtgacttggagtctgtaatgactgatgggcctgcacatgtgtctatctagcagatacacttctaacagcacaattcacatccttttgatttttttcccatgcgtacatttctttagagcacctgggttgtttatgcaatttcctgtttgtcaaagggtaataaccatacctcacgaacttagaatttttcactcgtttacaatttaaagtgaacagaaaagtaaaacttaagtgtttaatatttttgagcttctagaatattttaatatgtaataattatatatttgacacaaagaattggttaccatatatatgttcttaatttttttgtagaagtcatacaaaagaatgtatggaaagaaaggggaagcggaattaccacttgatatacagacaaaaaagacattttactaggagcacaattaagaggaaggaacaatgaattaattgatcttgatcaaggatataattatatattagatatataattacataatatatacactcatatctgattatatatgagtaacacaattatatgtaaatgtaggatgaatacactgaactctctggacacacattcctttgtcacagaagaagattcaaatttgaaaagtaattctcccggtaggattggtgctgcatttctcagccttagcactgttgacattttgggctggataattctttgttgagggggccggtttctgtattataccatgtttggcagcatccttggccctacccagtatatggcaggtacaaccccccttctgcaagtcatgacagccaaaaatgcttccagatagtgccacattccctgctggagggtaaaatcacccccagtggggaaccactagattagaatacctgatgcttcaggttacaaaggagaagtgctcaaacaagcccaagtgggcagaacagcttctgtcctaggagatggtaggcaccccagcttctgttgggactcacgccaacagcccttcacctgcagtagacttttctaaagtagataaagtctagtccattgattatttttttattttaaagtttttttattttaatatatttcttattctttaaggaccatcccaaacccagctttgcaaggagctcttccttcaatcacacatttactcctgtgaattggattgcccgcaatctcacattacaacttgatgatactaaggtttattgttgatagtaatgtcataatatttttttctctttgaagtacaacttatttacttccttgaattttcaacataagcaaatttcacatattagataattctaactacagtgagagaaaacatttaataaactttaaaaaccaaaacttttatttattatttacaatataaactttatttacaaactttatttatttttattttttgagacggagtctcgctctgtcacccatgctggagtgcagtgacgcaatctcagcttactgcaagctccgcctcccgggttcacgccattctcctgcctcagcctccagggactacaggtgcccgccaccacctagtggaagtattcctagtgaagacatgttgttttccatagttactgccttccttcactgatcacaagcccatcagtctttcctttctttatcatggtttgttatttctgattgcttctctccaagacagccacctaaaataatagacactctcatgtaaattatacacatcttcctaggaacagtttaaaaaatttcctacctctcaaaggctgctgtgaagtagatttgaaggcgaatgttactctgcttaaattgtttctcatgtcacataatgagataacaacatatgggtagagaatctgagaattaggaatttggagtctcatacggggtccgtaatgatcaagttaccatattatgcccctgtcatttacccaggaattgtgccggtaattgaagtattaactaccagatacccatatttactttggagtaattatttttattactgcatatgctgtggaaaagaggctgtgttttacacttctcattgaggaggcagagtccatactcctgactaagactgcagctgtcttcattctgattccacctacctttctgtctttttctcctgctttgccatgctgggggtgctgcttcatctaaagtcttgctgtttcccaaacacaccatgctctttcagacttccacacctttctggatatgtacttcctttttgcttgaacaccttttactctcttcactgcttcagaacgtcttgcttattctttaagactttgcttttcaagtttgctccctgagccagcagcatcaggagagctgtggattctcagctgctgtattagtccattctcatgctgctaataaagacatacctgagactgtaatttataaaggaaagaggtttaatggactcacagttccacatggctggagaagcctcacaatcatggtggaaggcgaaggaaaagcaaaggcacatcttatgtggcggcaggcaagtggggtgtgctggggaactcccttttattaaaccatcagatctcatgagacttactcatgagaacagcaggggaaaaacctggccccatgattcacttacttcccaccggatctctcccatgacacgtgaggattattacaatttaaggtgagatttgggtttagacacagagccaaaccatatcagctgcattctagacccgctgagtagacctacccaactgaagggaagctgggaggggaggctcatggtagctccgaggagggcctgggggagatcggagtgcccttaaggggctgacactcccacatagaccatctgggtcttctgagagggtcagaagagggcccagtgggctgttttaacaagctctctaaatgatcctgacatgataagagtttgggaaccaccaccttttagacaccattcaaatagcaccccatctcctgaagcttatcctgataactcctcaacaggtagtcagccatccctcctgttggggcatttttttttttttcactgtattggttaggcagggtaggctaactgctgtagcttcacactgtacagttttatttctcatgtgtgacacgatctcaccaggtgtacatgcggtggtcttccatgtgatgatgtaggagcctggcttcttacctctgtggctcctgtgtagccagggcctcaggctcctccagattccctgcatccagtggccccacaggtggggagaaagcaaggatcatcaagcagcatgttccttgactgtgcctggtctctgcgaccttattattatttttttttacttttttcttgggccagaacctagtgacgtagtttcagcctaactgccaaggagattggaaagtcgactgcctaggaagaagagacaggattggggattgcctagtccaacactttccactaaaaatataatatttttatatatgtatatatgtaatttatatttatatataattttacattttctgctagctatattaaaaaccataaaaaacagataaaatcagttttactaatatattttatttaacccagtatattcaaatattattcaataagtaatcaataaaaaaactcttaagatattttacattctttttgtcacacagagtctttgaaacccagtgtgtatagcacatccaggttcaactaggcaaatctcgagtagccccgtgtggctagtggctaccatattggccagcacaggtctagctactcctgtcacacttgttattgaaattacttgtttgcggccgagtgcggtggctcgcgcctgtaatcccagcactttgggaggccgaggcaggagcatcacgaggtcaggagttcaagaccagcctggtcaacatggtgagaccacgtctctactaaaaatacgaaaatcagccgggcatggtggtgcatgcctatagtcttagctactggggaggctgaggcaaagaatcaacgtgaacccaggaggcggaggttgtggtgagccaaaatcatgccactgcactccagcctgggtaacaaagcgaaactccatctcaaaaaaaaaaagaaattacttgtttgcatcccttttagtccactttcagacatcgtactcttgaactagattgtgtgttccttatttcccaaaccttgtgcagcgctctgtggttaagaaatgcttgctgagtgattagcaaggaaggaatttaatgcatgaatccatccattaatgaatggattaatgagtaaatacaggagagcattccgcattccttttggttcttttgactactttagtgagagtcctaaggtgttctcttttgtgataagtgctgggttgcatacagtatgacaaaattagtatagtagaaggataaagtgagcccattaactggggtgctcatatgtattgctgaattgcagagtttgggctgaaaagaacttgaccatgggattgtctgtcctcatttttgtggatgtgtgtccctgagataagtggaaacatggaggtggcacaccagccttggggagcaaatcccccagcacttgtggtcgccttaagtctcttgcaattaatctagaagtctcatgtttttccccaaattaatgaagagctataagctgtagtagtatgtgctgcagttatttcaaaatgagttgttggggaacgtgttatttaacatactctcaattgtaaaatgctgccaaacaaaacttgcttaagattttttattttaccgtcttttcttcaagtcttataccagggaatagacaagctcatgaaagttatatcaatacagtgtctgagtaacagattctgtttaaaaggaaaataatagtacattaagtctgtaacactggatggggcattattttcattgcagtgaattgtgaagaatgcatacggaagacgtgacttctgcatttttttcctcttatggtggagagaaaggaaaaccttagaaatgcctttactcttctctaaacagattggttcattgcttttagttaccatcctatgatggtcacacatttgaacttgaatttcaagagcttgtaactgaggctgtgagcaactaaggcttttgtgactgaattgtaggcagcagaacactagggttggttttgttctgggaaagtatactgctaagcaagtgtttcaatatgtgatcacacaattacaaatatttgaaagatgtgtgaatattgtactgctctgtagaccctttcttattggtttgaaattgaaaggcattttacttgagcatggaaggaggagtgggggaagagggggaatggtgattctaagactttgtatagcatgaaccctatataaaattttcttttttctaaaaaagtcagttaaatagaaaatgatcagtcattaatgagtcaacgtctaccatggcatttggaataaggctaaggtgtgtgttctgtcctgtggaggatggtaaacttttggcttcaatctctaccccactccacctctcactttcagccaaataccctcatatgtgtcatatctgtgcagagatatttctgggaacccattcgtgtttccttgtcttggatctgtgtttaaacattgtgggtgttcttcctgtatcttaagttatattaagatcagtgattccgaaacatgggtgggtaaaagcctgcagcataggtctcacctgggaagttgtgcaaaattcagatccttgaggctcagttcaggattccgattcagaagttctgggtgaggtcctggaatctgtattatcattattattattattattattattattattatcatcatcatcatcatcatcatcatcatcattattattaattttcaagctcccaaaatgacttgaggcagaactaggtttggcaacccttacaagacaggggtcttggcttcacctcacttttgctggagtaccaaggaggaaaatattctttgggatggaatattctggagggtctcatgaaagaggagaaccttccaaggtgagtaggcatttgacaggttaagatcaggaagaggtgggcgaacattgcagattgacagcatttctggagacatgaggtgaggcttcaggaggcaacacagtgttcttactgcaaaggtttgaggcagggagtggtgaggaagggccagggtgtgtcagccctgaagacagtggctgaagggtggccccgggccagtggttgccgttcagcacatggggatgccgtcctaccctgggagcgagatctccagattccttccccacttctttcacgggggaattaatgtgggaggaggaatccctgctcttgcatctgcatttcctcttttcctccctctgttcaatacttttcaaccatgaggagcttcatttatgtgtgcacaagaaaataaaataaaaaaggtttcaatacagtagggtttgggtcctctgcccagattgccctgtattacttatcttctaaagaagaagaacgttgagcttcagttttaagtctttatagtaacagtggatggtatttgaagatctggtcacttgtacctttaaaaatgggtgttgattttgtctgtctggtcaaggaatgtaaaaattacctctaaagaatctgtttaaagtagttctgccacgtgacagctctgaccttgaaccggttctttaacttctgtgtctcgctgtcctcctttgtaaaataagagacctgtctcagggtggacggaggaccagatacagtgcttatcccagtaccactggaacttgaggcaaaagaaaataacttggaatactgttcctatctttatttcaagttttgactgtttatcatggcttttggaaggtattatttttaaatttaagtatttcattaaaatagtatctcagttactgagtttttagtgctcttgtatattttgttcccgaaatgaatacctcgctcacctgcctctggtcccagctctgaaggaggcaccctgtaagcatttgctactttcctggacattattttaaaatacttcccaagtggtaataaataacttaaaaattttttttaaagtgcctaaagtaattgatacttttaaaggaaaattttaaatatacagataagtagaaagaagggaaaataaaagccatttgtttcacatttctgacacactactgttaacattaaatttttttaatgtttttattttttaaatttaaaaaaaattttatatgctgttatcttttaatactttcaggccttggacaactctccaatattttttgtggctctcccaaaggagatatatgctcaaaaaggagacaaaattatgtttgaaacaaaacttaaaaatatttggatctattatttaccagttatgttaattttggaacataactccaaagcatagtaactatgtgaacttttgataagctatttaattcataagagcatcgagggttaaattgaactgaattgaataaggatgtatgtcaagtgtgtgtgcaggggtcccttaaatgtttttcttgctcacctgtggcagttataataaaaaagtattgacttctagctttaggtcttggcaaagcctaaatggaagagcgtgtctggagagttcttaaatgcttatgtaacatcgtaaacctcacttgttttgtatttaacctcctgtttttgaaacgacagaagggcttaagacctagctctttgtagatgggccagtggaatgttcatatccaccaatgttcaagttttcagagtttgattaaacgtctcgctgtcttttttaaccacacttttcttagaagagtttttttctttgttcaggaggggaagatgaaacccgttgtgttacatgtataattctttttaaaattttatgttgacaaataattgtatatatttatgggatacaatgtgatgttttgatacgtgtttacattgtggaatgattatatcaagctaatatttatcacctgacactttaatcaatttttttgtgatgagaacatttaaaatcaaatctttaagcaatttgaaagttatttggaaatgtaacagaaacccattgatggtggtggtggtggtggcggtggtggtggtgaagatggtgatggtgctgcagtgacctttggtcttttaataaagctgctgaacagtctaagattacttctaagttatatgatgtgtgctttgatttgacagcagagagaagggaggctttgatggccttccttagcattcaccctcctcacctgccatgtttatatctccaactctagtcacctttatttgtagcatatctacctgtgaataagtttaatttagtttacttacatattttacaagcacccagggggaaaagtttgacttcttaggacgtgtggcccaggaataacaacgtgtgagcccctaaaactatctggcagtgttttctatttcttggcggtctcttaagttcacataggaaatcagttacaatgagcttggaggaaatagaaggccctcctctaggcagcaggatgagaaagggatacatcatctttgctgctgatgatattattttatggaagggatataacctattgctttttagaagaggggacttccagatgattgttggggagctgttattactatacacggtcattgtcttctaaatgcaaactaaattcagccagaagtgctaggggaaatgctacaattccctttgtaaagtttctggtggactttacccttgtaacctgagagtgtgttcctttttgcagaagtacgagtctagagttggcctggcggcctgtcccctccacccccgatgctagatagctaattgctgtgaactgtgacactgcgactcctgccagcttggtccatctccatcacctataaattgagatggtccaccagctttgcaccttgtaagcactgaaggaacttgctttaagtaagtttaacatacaaatataaggtctacaaaaccaatgaacttgaagggcggcaatttgtgttttccgctaggttgctttgggagctggacagggagaagtgaacaaaagaacatttgtcttttagttatacttgaatgatgcattttatttagaaaggaaaacttgagcgctttttaaaaagttttgatcatgtttttcacgaagaatacattctctggcccttaacctcagcatttgtgatgtagtgaggaaagtgagaaaattctagcttgtgaactcctgtgataaatcataccaaagtgaggcaccttcatcatttattctagaagcaagcatttatggattgcctactgtgtacacaatactgtgccgggcgtggggtggggtagggggatagccccctgccctcctcaccagcgctcaaagctgaggaagggagataaaacagttacagatcacgcgaaacaagattgaggccaggttttggtaacccataccaggagtttagtttcctgagaaaaatcccaggcacattatgtttctcttggctttgtaagtttccatctctaaaataaattattgacattagctaactgaattattgttatcacgatcaaaataaattgatagtttacagaaaaaccgttggtgtccagagcttaacagccccatttccaaactgagaggatcctgagccttcagtaaattcattcaatgtatattttctcagcacctgtagtgttttaggacctgggaacacagcaatgaacaaaacaggcaaaaatgctgccctcgtggagctttctacctgcgggtagggaaggttagacagacattaaataagaaaagtagaataggatgccagatggtgatagagcctatggaaaaatgaaggccgggaaatgggggaggatgttacaggtgggggtggggctgtctttaatgagaagcttcttaaaccttccatggctgcagacagagccttctctaaacagtgggatgtgtccttcgtcagcctgactctcccatcttagcttcctcatctggaaacagaggtttctttagggactgccccctgctgtgccagtgctgtgggttttcccagagctgagagcgcaggccccacccccccaactgcccacccccctgcccccatagtcttcttcactgatagcacgttatagttctgttatgttcttgttgtctgctggctccttggctcagcccctgctctgttggaaatgagaatctgacatgtttagaaagatacccacttttttgtctttgtgtttttcttttgtatatagtaggtcagtgcattccattgagtggtttgtttttccccagatattatcaataaggaaagttctcatacttaatattatagatatatagagctggaaagatttttttggtgtaagtccttcattttacaggtaaagtctgtggggcccagagaggtgaagtgactttttctaatgtcacacagctgttgtggggcatagtgagtggctagaaccccagcatgagcttcctctataccattatctcataatccagctcactgatttctgactaaagaagtgatgaaagcttttgcagaaaacttgcagaatatagaagactttagagagaaaaagaatcactaatagtaccatgtaccagaggtaatcagtagttacattctgttgtattttttttagtcttgtgtgtgtgatagtgtgagcattttctcaatgtcctttaaagttcttagaaaacagtttttattggttatgttatttgccctgttttggagatacaactattgaattcgagttgtccaactggcattaggcttcaaatgatccatttactgacttgtgtcaacaaatgagtagactgtgcacatgttgacactgctgattggcatccactggttgtttgtttacctcatgcctgatgtttaaattcctgttgttacccctccttaaatagaatgtgaacctgcccatgggaagagatttgtaccacagaactttggttggctctctagctcctcactccaggcctcggtctccttgttctatgagtgaaggaccttccaatggtcccttttctgagaactaggtgaactcccttggcctttctttaggaaactcacagacatacaatttcatatgtaattttagagggtttgtggaccaccttccctaacattcagccttggattctgggctaagagacactagactaggtgataatgtggattacatttctgtgactatttgattaaatctgtaatgataaaaaataattgaggaggccgggcacagtggctcacacctgtaatcacagcactttgggaggccgaggtgggtggatcacctgaggtcaggagttcgagaccagcctggcctacatggtgaaactctgtctctactgaaaatacaaaaattacccacccgtggtggtgggcacctgtaatcccaactactcgggaggctgaggatggagaatcacttgaacccaggaggcagaggttgcagtgagccgaggtcatgccactgcactccagcctgggtgacagagtgagactccatctcaaaaaaaaaaataataataataataattgaggagggcatgagactttatatcagatgtatcttttcctatattaactcttctaagaggccctaagggttgtggtcgagaaactgtctccccctcccaccactggctgccaccacatcttctcttgctgtatgtagctttctctcctccctcgctggctctttcctgcctcactccctgaatcagttgtctgcagtgccgttctgctctctgttttgctgcctgtcttgctgtcttccatgcttttgtctttctcagaaggcagatcattttcgggccccttttctttggccagcaagctgaccagcaacagtatactgcggaaaatctttagtcatttgttttcttttgcattttttcttaatttctacttattgtttctacttccccagaacaagagaaaaggaatgataactttggagtatacacaagtacatgtatataagtaatataggtgtacatatgtgtgtgtatgcatatttttcttttgcctttgttataagtatccttctgatatgccaagaacccctaataaagacagtaaataacttctgttaggttgagataattgatttattcctcgtattgttattcctcagatggttattagctatggttagctacagtatctacagtttcaaaatttatatagatttattgctaaaaacacgtttatttgtacattttaaaactttagttttactgttttcaaatacacttcgtctcaaaaaacgtctagcaaattttgcagaataaaattttcttacccgggagaaaggaacatttttatttttagtagtagtgaaaattgttgggttttgatttatgaataaactattgttgggtttttattttcaagcaattgaaagcttctgccttaatttgggcccttaacaaatgaaaatgtttgcatatttttacaaatacaccatttcactttagggccaaagatgacaaacctgctatcagcattcagttcagcaaatacatcgtgagtgcttttagtccctaaggccactcaaaggtggttaagatacagtccctgccctcagtgaattaacagtctcactaaagggttcttctaccggggcaaacttaataaaaggtaaactctgaaaagctccataatagaggtaaaaagtaggctcagagggttaactgagaaggagccaattcattctggctggaggggttcttggggaagatggtatttaaactgggtcttgggcatgggtagcagttccctctacagagagagtcactccttccactaatcagagtgtgatggaagtccatcttatgggtggaagaggaagatggagttttgcatttaaagttagctttcctttgagtcacaaattgcccttggaacatttcttaaatttcctgtgaggttttcatggttttgagtacccgagctgtataataaatttgtgtacatattaaaatttgagacctgaaccccattacagaagcattcattccatcctgcttctgaagccttcctcttccccacagggtttacaacatttttaacagtgaaactctatacctttcatacgtgttcatagatatgtttgttgtgggttaaacaagctggtgtgtgaaggaactcaaggttagtagatggtaggagctcagtgcaggtttgtgaaagttgaatcgggggtcggacatacaccttgttgtttgaaatgttggaaaggaaaatgtggccacctacttcctgtcctggtaaaatggcatttcctctagtggccacaccaaccggatgtcatcctcatgtcctcacacatcagtctcatgagccctttggagaaaccacatcccatttggaggcttgggatctgaggttaaacgcggtgccatgtgactctccttgacagtcagattccaaaagtgttggtttgtcctaagtgagcaggggagagcgccagcactgcctgagaagttgtgtgatgggaaagctgacagcagtttcttctctcctccacgccctcagggtttgcttctttcataaggtgggccagctggaaggcggtggactcagatgactgccttgctctcagaattgctgttctcaatcttggatttcagtatattgctctgagatgggagtaggaaatagctatgtgaattttgtcactgcatttcctgcaaacacattgccagccttgtatattgcacattgatggtccccctttacataaatctgtgtgtgaggcatttaaaaaaatttttacttgcttgggccaggcatggtagctcacatctataatccccacactttgggaggccaaggtgggaggatcgcttgagcccaggagtttgagaccagcttgggcaacatggtgaaatcctgtctttacagaaaatataaaaattagccaggtgtggtggcatgtgcttgtagtcccagctacttgggaggctgagatgggaggattgcatgagcccaggaggtggaggttgcagtaagctgagattgcaccactgcactccagtctgggcagcagagccaaaccctgccttgaaaaaaaaaaaacaaaaaacaaattacttgctttacaacttgatatattttctccttttgatgttatatattatggaactgatcatgttttcctttttgtcctggctacttggaaactcagagcaaattaaaagtgttttccttgatcataaaacaaaaatatagtcattgctaaccattttgaaaaatatagaaaaacttcaagaagaaggcctggctcatgacatgaacatgtggggttcaaaatgaatatttgaaggcagctgtcataatcaagccacagagagggaagaatggttgatgctaagttgctgaagcgctttgtaatgtgtgatagcaacacggttggtggaattgtcattttagatcacacagcaaaagccctgagtttaagactaaaattaatttcttcaggttggaatgagaacagcaacaatacagtagttaccatcaaatgaatacctgctttgcacaaggcacttaaaggctaaaggccatctaaagacctttttacctcttcacttccatgatagggttaaagccagatgctgctgtctttaattgctgactggtgattggtattgtgccttttagcagtttgaacatagtatcatggttaagcgtgtgtacactggatccatattgcccctgctctctgtataacgttctgcaagtatttaacgtctctgggcatcagtttcctcatctgtcaaatgaggataacagtattacatagagttatgaagattaaataaacaatctttgtagggcttgaacaggcatgggccatagccagcacttacagtgtttgtcaaataaatatcttaaagttcatttctcattccttacagaataccagggtattttgacccaacaaatagggtaggctgaacacagtggctcacacctctagttcctgctacttgaggggcttaggcaggaagatccttgactccaggaggtcaagactgcagtgagccatgatcgagcccctgcactcagcctggactacagagcaagaccctgtctcaaacaacaacaataacaaatagaatagcatttctcttattaatgcccagacattctgatggcttaatggcgatggggatttgaggaagaactggactatttagaacttcctgaaccatctcaaaaaggtttctgagttgttggttgggctgtcctttactaaggctcagttagtctgttttgtgcttgtggcttcatcctttctttgatttgtaggacattcctaagtttttactttactataatttcgactctataggtaagtgagagttttttcttactgggttttttctgttgtaactttacaaagaaagatttttaaaatttatagataatattattttggaacacagatttggtagggggacttctattaaccctgaaagactacccaaggttgagagattgggtagtttaaaaaaaattatagaagccattaatttatttgatggactcattgatcctttgagatcgttacataattgatattcacactcagaagggttcctggtgttcaagtggcagagacccagcttcagcttcactcttgaagtagagcagctgcagcaggtgctaggagagggaggcggctgtgcgaggactgggtggcatctcagttctccccactgcctcctctgagccctcctggctgcgttcctttgtctggaaagtgggagacttttacctgtgacttgtataatagtttatgttatttccctgggtagagttcctctggcacctattgttgctacatgataactactctcgttgttgactgactgaatactgctgctgctgctgccgccgctgctgctactactactactactactactactactactactactactactactactattgctgctgctactgctgttactgctactgctacggctgctgctgctgctgctgcttgttgtctactgttactaaatcttccctgatgtccaggaaatactcagagtaactaggaaaagctctgcggtatccatgaagtacagagtaatatttgatcccccctttaatgttcatttctacataacttttagacaaatcccttaatacctctgttttaatttttcccaagaggtaaaaaagactccactgttaaatgtgaggaaataataaaaatacagacttttaggaacacatattttgggtgctactaaaccaccattgaaccgtaggttggtgatccagctattttcccgtgcttttgtgcatctctctcttaattttattaatttgtcatttatgatgtctgctcttcttgccttcccagctagatgtgaagttctttgaagggagagatactctaccttatacttttagtatgatcctctcagcacctagtactgggggtaccttctgatacccacacatctggacttaaagtaatattctgtttaataaatgcatttactatgatatgtggtatcccatgaaaatgttttgatgacctcatctttctggcatcaaatagtacataaattaagtgtttcatgctgtggtctgtcatgcggggtgaaactcatttcctccacctgtatccacgaggtgcaggctatgggaacatacttgctggtagctcttccctgctttaatcatcagccaggcatttggtttttaaccataacacaaatgaaagcattccaaaactggaagaattttagaacaagcagacaaccttgctgtctcttaagctccacgagcttcagatttaaggtaattatgaaggagtctaactgtgactggttttcttttaaacactgcagtattttgattccgattgatttggcccacgctgtgtggaacagacacaataaagccggtctttatcagagaggcagtacactgtgtattgttcagcttggagtttgttttcctttggccagcaagtaggagcctccccttttgcatggagtagtaacacccctggaggctggcctttgctgtcatgccttcccaccccacaggctctgcagacccagccagcggggctgaccacttgtgcctgggaagccagtttcctttccttccttggaccactggcatgcctgtgccttgcacggccagggactcgcagctgttccagttgcagactttctgacttgcgttttcagccgagaatgcaggctgataaatgcaggacaagtagtagaagtgtcaaaaaggaactggtgattgagtcccccctgcaatacaaggatgcagctcagggcgaagtggaagcagagagcccgggccctgtgccggtaagagggtctcgtacaaagtgttgctgtgtctacccaatgctgggttcttattgtgcgtgtggacggggttgacgcctgttgcctgtctttgatttcaaaacttgctctgcttgtcccttgtgaactccactctttccctgtaatatgacttcgattcccctttgattcttctttgtgaagaaagaaatgttgacattttgtgggtgaatatggtttctgggaggtttctttgtatgggacaattatgtattgttcacaattatgtcccacctagctgcagtgtttgcaaatgtaaacccaggaagcatattttaattgcaactatagggttgaaaaaagatgtgctttgcaaaattaaaaccttttctacgttatttatgctattgagaaaatgaggcaggtcccattgggggttttaaggaacataactgttggaaatattacatagtttagaaaggataaaatcacatatgttcttctcactcattttaccaggaggtttgccttgaataaagtagggaagaacctaaactgtgaaccagctgatagaaacgtttctgttcttaacatcagctaaactctcagcatttgtctaaagccaagtgctttggtggactttggaggggaggaatgtgaaaaatggttgtgttgttatcatcagtgagtaggttgtgcttctctcggaatttcttcagtacaataaaggcacataattttttaagcaagctgcacaaaaccaccaacatgccctgcagaggggggacaattgagcctttcaaattatctgctaaagagattgttaaactgatatgtagtgattttatttagtgatttttttttttctttaacgtggaggttcagttgatgttaccatgaagtgtttgcttactaatttacttaattttcaattaatgtctaagaatctgaacttaaactttcctataacagatttgatttgaactgagttgctttctttgtgactcgtgagactgccctatattttattgccttcaaaactatattgctaaccctgaactgaaaagttagtaaaatatcatggtctttttcactgcagattttcatcttagagatttaggtttcttttcttcaccctctgctacattgtttagaaatgtaattcattgttctggattccttgctgccaatataatagcccacttctctgttgggttgctcacaggctgtatggatttcactgcttaaagcagctgatgtaacttaggatttcttggaggaagttgtgtggtttaggttcccttgtgaatattcttaaaaatcttctgtcagtgattctccagctgtgtagaaatatttgtctacaggactgaatacactgtagaaagatgctatgcaattttttttttttaagcacacaagtgacttcttaaacttacttctctttctagtgctcaagaaatttgccatttatgtcctagctatttgtttaggtaaatctcactccaggcagttcctctgggggtctttttccactgcaatggataaagctgtgctggctacagctgcatttggtgggaacacttgtcagggcccagcagcttgtggcagtgtgatctcagctctgcgcacctgcagagaggggtgagggagtgaggaagccaacagtgataccagaagttttttcttatcgggcagtgtttctcttcttccagcagggtaaacaagataagaagagctaatgtcagatcagggaagcaaggatatttcagcagggcctttgccgagggcagatctcttacctgtggctgttgctgcccactggcaaacaagagttcaacagactgctggaaaggcaacttgtttctcaagatgatttttcagaaggaggcagacaccattgtgcaacctgtttgtggcagtactattcattgttcgaatgtcagtggcccacgggcttggtaagaatccccaagactgtctatcatttgaatgcattatacctagagacgtttaaatgtaggtaacatgctttattcaggaggtagcattttgaaataaagttttgctgtttttagttatgtacagaaacagtccttggggaaaaatattacataaattaaaacggataaaattaattaatgcgtgtagtatagaagtaggaaaaacaagaaatgcaaatagtgtagcagtaggaaagacagtgtccttgtttttactctccagtggtgaccattattaataattcagtgtatatacttccagactttctcctgtgcctagaacagtataacttgtgtgtgtgtgtgtgtgtgtgtgtgtgtgtgtgtgtatgtgtttagagaatatactattatggtagatttctggattgattttctcccagaacacgtcagtaacatcttttgtcaccatatgtggatttatgcctttttttttttttgagacaaagtcttactctgtcatccaggttgcagtgcagtggtacgatctcggcccactgcaacctccgtctcctgggttcaagcctcccgagtagctaagattataggtgcccgccaccatgcccagctaatttttgtatttttagtagggacagggtttcatcatgttggtcaggccagtcttgaactcctgacctcaggagatccgcccgcctcggcttcccaaagtgtgattacaggcgtgagccactgcacctggcctatgccattattttaatggctgcatattatctcattttaggtctgtactataattggatcgttatttaatttgtttctaattgtttgcattagtaatgaggctaccataaatgtacctgtaagtagatcttaaagcatgtaggcaagccagtatttgttctagaaactttctatcataagttccctcctgcccttatgattggtggtaatgttttttctcctctgccagggccgctttgaaggtttcccttagcagtggctgcttgttcagtgttagggaaagttagtatttctttttctttctttttttggaggtggagttgttctttttttttttttttttttttttttgagacagagttgctcttgttgcccaggctggagtacaatggcatgatctcggctcactgtaacctccgcctcctgagttcaagcgattctcctgtctcagcctcctgcgtagctgtaattacaggcgcatgccaccatgcccgactaatttttgtatttttagtagagacgtggtgtcatcatattggtcaggctggtttcgaactcctgaccccaggtgatccacctgctttggcctcccaaagtgctgggattacaggtgtgagccactgcgaccggctaaaagttagtgtttccaagagaatatgtgtttggacattataaagtttcagaggctgcaaggttcaacttacaggcacctacatgggtgggtcttgtcccctgcattgtgacagtaagtgagggaggaagcacatggtgaaacttccccatttctatccaggcttactgccaaccccactgagaaatggctttgggggctagaaatcactaccaggggaacaggcaggatattcttgatgtctgcatgttagtttccctgctcacatttgaatacctatttttaccccctacccgccaccccccttcaaaactctaacgtaattcctggaaacaatttattctaattgttactgctcaacagtttagaggaaaaaggtgtggcttcaaagtgccaaaaaaggctgggttatatgccatttatgcagccctttcattgggttccttttgtgaggctggtagggactgcagcacaggtcttattttgggaatttttaaggttgaaggatgtgaagattgagaagagctgaattttcctattaggtgtactcataaggtattttttgaaaaggatcagcgggcactgtggctcaagtctgtaatcccagcagtttaggaggccaaggtgggcattgcttgatctcaggagttcaaaaccagtttgggcaacatggcgaaactccgtctctacaaaaaatacaaaaattagccagacgaggtggcatgcacctatagtcccagcttctcgagaggctgaggtgggaggattgcttgagcctgggagagttgaggctgcagtgagcagagatcacgccactggactccaggctgggtgacagagtaagaccttgtctcaaagaaaataaaagtttcttttcagagacaccttttgggtggctcatattttcctgggatcctcaagtgttaaaagcagaattttagttcttattttaatgtttgaatgaccacgtgattactctagctaaataactctgtgagaaggcagtgcgagtacttgatgtagaaagtagtagtaggacttggcttctggttggacacaccagtaccttatctgggaactcttctgtctctcagacagaggaggaatgagactagaaaatctttcctatccctgaagttctgtttgctctagaaatagcagactaagtgaggtataagcttatgggcaatgatcatgttgttaattttcaattagactttaggtgactgtgattgagttaattaaattatgcttagacaatagcctttctgccctataggttttcctgcacccttagagacaactttagaaaaagataatgatattacatcaataatatttaataagtagtttccttgtttttaaaatattggatggtgaaagaaagatgttcccaaaagctttatatagtgacctattcctagtgacaagaacaggaaattttatttattcaaagccatacaccttcactacaatgctctttgtgtttcatttgtttattcattaattcagtcaacccacatttacaagaatggagacttgccaatcttattggacagtgcattgaggcaaataagatcaaaaccctccctctccccaggcagcaaggcatgaggaaggaaggggttcattcctctggaatgctttcatgtgatctttatcaggcacagtgagtgttaatgccgccctgtcctttctagacacttaggcagacaacacttaaaccatcagcagctccaggaaggacgtgcttcagattttttagcagctaacataggcatagccaggctttgcagaaggcgcaggccgaacccctaactgttcatgtgatcagtgttacatgaggctcctgctgctgcacacctattttgtggagcggtcggtggaaggaatctttggggagtgcatgcttagatagggtccgagtgaatctaattaccatgccaggcctggaaaatgatctcagacatggggcttcagcagtttgttccctacctcattgccatgccaagtcactgctacctcctgggtagcagtgtatagaaactaaaatcgcttgtatagaaaactaaaaactaaaatccacccagctccggcatttattttctcatgatctgccatcagcatggagggagaatggctggtgactgtttttttatagcaaggtaatgccaatagtcatgtaataataaaaatagccactacttatatggttccctgctctgtgccaggaactgttttatgcctgctaaatgttatttcaattaatcctcacaactctaggaggcaggctctattctttttcagacgaggaaactgagcacagtttcctcttgctcaaagttacacattcaataagtggcagagccaggattgtagactttgggtcaggttttctaaaatccatacctggacacatatgcacgattcatgaacaaaaatgaacgtattcacttgagcttagcattgagactgtaacaataaacaagaaaggaaaaacacactgctcttaaaaacttgaaaattgttagagaaaggccagtttataagtgataaccaacagtggttgaatagcatgaagacaatggtggtcatgtgaagaactaagaaatatgaatgaaatagagctgccgtcaggagtcactcttatcttgggtgttacattttatcatcttcccagaaagttacataggagcatagactggtgagagtctaagaatctgcaggcatcccgttttcctccctattttcctttctttttgagatggagtctcgctctgtcacccaggctggagtgcagtggtgcgatctcggttcactgcaaggtccgccttccgggttcatgccattctcctgcctcagcctcccaagtagctgggactacaagcacccaccacaacacccggctagttttttgtattttttagtagagatggggtttcaccgtgttagccaggatggtctcgatgtcctgatttcgtgatccgcccaccttggcctcccaaagtgctgggactacaggcgtgagccaccgcgcccggcccctattttcctttttaaaaaatttatagatgatccaggttaatcctgaaatgtttattccctaattagtaaaatgggcactgtggtccccatagtgtttacagaggctgccatttgtgcaggtgtgctctactcttggaaaggtagcagctaaacacgaggctgcagaacaatgtccagctggctggtggcacgggtgggccaagagaccagggacctaattttgatcctgcatctgcctctcaatctctgcagatcaccaccctcctgggcttcagttttcttacctgtaaaatgaggagcctgtcgtacataatctctaaggtctgggactcaagctctagtgttagcatctttgatctcagaataacctgggatggagtcaggtttaggattgtggagttttagtttcaggttttaagctttgtttattcaaaattgtttgggttttgagttgttggagctacagaatgggatcttggaattccacccagtgtaagaagtaagaccaagggaatgggttggccacctggaaatgaatcaaaaatttggagttagcagggcattctaggcaggagataacaagacagcctagctccagcctacagatagcatatgactgtgaggatacttttagaaccaagaaggattggaaattatagttttcccccaactttccagaagtttgaaataccctgtaatgtgatatactagtgctaagtctcttttagaatgacattttgaggctttggaaattttcagcgttccctttcctgacaaatgtaagtgccacttaccagtgggtctcaagggctctgccaggttcccggggaggagccagtctcgtattctgctttgggatttccttaatatggagagttgtcactgccaagggaaaggcagcagcaagcgatgcagagagccagcactcactcacaggaggctcacttggcacttctaagccaggactgcattgcatatcagacagaggtagtagcagtggctgccctccagatcccccatctctgaaggttctctggactgcctgttccactaccacgttctgtcttttcttacactgagccatgctgcattgtgctatcagaccactctttctaaaacagagacgggtggggcgtggtagctcaggcctgtcatcccggtactttgtgaggctgaggtgagagaattgcttaaggccaggagtttgagaccagcctgggcaacatagcaagaccctgtctttacacaaataaaaaataaaaaaattaacccagcttggggcagacctgtagtcctagctatttgggaagatgaggcgggaagattgcttgagcccaggaattcaaggttacagtgagctatggtggagctactgcactccagcctgggcaacagagtgaaactctgtctcaaaagcaaaacacaaaacaacacagccaacagatatagttgttaattatctgcttaaaagtcttctctgactcttcctttgcagagaacgcaaagcatagcttccttgattcacaaaggctgaccctgaatttgcctgctgacctcatctcctgcagcctccaaaatgtgccctgaccccagctttccagtcttccttccacctggggtgctttcacacctgggcacagctctgcctttgcctggcatgcactgccctggttaaaaggataaaatcatcattttatgcttcaagccccagttcacatgccagcttctttgggaaacccttgcaaaccctctccccacatttcccagtagactgtgtgctcctgtagcccatcatggcgtcgttgttccagcttgttgtcaggcatcccgctttattgtagtgaaggtttatactccagtctccctcactaacggggcttctgcccaacaagaaccacccgagtggttttgttttctttgtattcgatgtctgatataatgtcaaagctcttttttttttctttctcccgcttctcagcatggtcctggtgactctttggggaatgtataggcaaaaaaaggttgcgaaagggcctgcaggaaagactagatctgaaaatcattcacgttttcatttgcctcccttccacctgcaaaggtttagccatcaatatccaaatgtcttgaattgccaaaaagtagaaagggatgcaagtagaggaacatgctggacttacatgggacgtggctattgtgcccctttactctcctgtgcatctgtgattttgatctctattaaaatgttggtgaacattttatcagagtacttttgtgtacagaagtgcagacataggttcccagagtcaaaccccttcctgttcctctcttagccagcacccctttctgttatcagtacctcttcttcctggcagccgtacctgaaaccctaacatcatatttgatggtcatagtacacttggaaaaatcaccatgtgacattgtcacaacagcttctcagtaaattgattatatctggaaagggtggagatccacaagatacaggcagagaagatggctcttccagggagaaagagttcagaaaggaggggcctattggagacactggagaatgtggtctgctgctttatagaaccaagactagacctaacttttatctctgatgtggtatgcttttccaaactattgtctgcccaagtaaaaatttcaggaagtggactgtcctttgttttgccatgaagtttaaaaaattacctgtatattaaaatttcttacagtctataatagtgctatctaatagaaatataacatgagccatacatataatttctgctctgttattttttgagacagagtcttgctctgtcacccaggctgcagtgcagtggagtgatctcggctcactgcaacccccgcctccagggtgcaagcaattctcgtgcctcagcctcctaagtagctgagattacaggtgtgcaccaccacatctggctggtttttgtatttttagtagagacggggtgaaccatgttggccagtctggtctcgaactcttggcctcaagtgatacccctgcctcagcttcccaaagtgctgggattacatgcatgagccaccacgcctggtcaaatttaaaattttctagtagccaagttaaagtaaaaagaaaaaggtgtaactaattttagtaatataattttaacccagtatttccaaaatattaccatttcaattttaaattcttatttaaaaaaaaggtattttatatttcattcgtaagatgtcattgacatttggtgtctgttttatgcctacagcacatctgaatttagaatcgtcacattttaagtgctcagtagtcacctgtggctagtagctaccacaccgatcagtgcaggtttatacttacacattctttagcttaaaagcctcaaactaaaaagctgtcattttgggggcgagtcactggatgaggaaaaatatttgtgattttttttttctgtaggaaaaaaatgcatgatttaaatgtgagttttccttacaaaggtcatgccttgaaatatttgatggtattataaattacatactacttaatggcattaatatgtgtgaagacatttaaacctggttctttggaaagatttagtattttggagtaggatttttaatatttttgaagtggaaaatgattattttcctggaagggactctgctttttatctctgctgtagtgagattgtaaagcctggttagttcagtgcctggcagatctcagagtggggagaattccctcctccctggcgacgtggagcctgaagcatcctcgtgtggagcaatgttcagcatttctcatataaagaggaacagaggcattggagaggcacttctggttctagaaatctgaaataccatcatgcgtactgttcatgtgtgatggggaaggtcctggtcttggggccaggagacccaaggatcaacccatctgtgtgaccttcagtaaaccatctaattctctaagtgtcagtttcctcatcagtgaaatggtgatgatgcaaccatatagttgtggggaggtttaatgagacaatatgcgtgtaatccagcaaggtgtgtatgttgtaggggctaaaattctattgaatgtgaactacacataactatgtgtggtccccaccaccaccatttggtgcattcgtgcactgtccaggcactgtatgtagaaccctggcaataacctggtgataatgataacagaaattgttacttttcccatctttagattaaagtatggagattaaaaggttaaataagcaacttgtccaaaggtgacatagccaataggcagtgaagccaggattttttgagaatacgttttaatatgaaattctcaaacatacacgaaagtagatggactagtagagtggttatcaaacatgaatgggcaccagaatcgtctgaagggcttgttaacacagactgtgaggccccaacctcagagcttctcactccgtgggcctggggtgaatgtgtatttctaacatgtttcaggtgatgctgatgctagcccaggaccaaacttagagaaccattgtactgatgtaatgaactcccatatacctgtcaccacctctggcagtagttcacatttttgggactaggatttaaactctaactcccaacacctgccctttactggtctctatactgcctgcctggcagtggagtctgcagaaactgttttgtgaactatgtgttatgaatattccattccctatccccaatatcttaaaataagtagcttaaagtacattgttttgaaatctgactaaatctggcttttagagccttttagcttcattacttgccctcttcatttcagagttccaaaattgtttttactgacctaggaagaattaacaattttaggtcataatgctaaaaaaggaagaaaaatgcctggaagagtctacagtctagatttgagatagaattatttatacaactgtaatagcacatctttttcttttttgattttatttctttccacatgtgaaaaaataggcagaattagaagccgagactactgtatgtgtgtgagagacacatgctgggcccactgcaggcgctctacctggttctcgctgtgttccccttttacccttcctggcctggtgttggcccatggccggtatcagggtagggagaagacacatgaagcactgcacttgcaagggagctgctcccgttccacctagctctctcctcatgtgactccccgggcacaggacatggaggaagtctcctaaattcccgtcttgtcttcctctcctcattgacattctcagcagcatccccagcgagcacagctgacgacggcaggcgaggagttgtgtaggttttccttaattggtattattattcctgtctttattattatttccatttccattatcatgttcctcttacctatttcaggtgctattgatttgacaaaatcagattttgtcagatttgtcaaatctgtataactgctgtataaaaaggaaattcaacatcgtgttagtgtttataatataaaaaactgcattcacaaatgtctaattgttggtgttagtctgttcttaggataacaccacactggagcatgaaaaatatatttagatgtctgggagtttggtgtttcttatgcattcttccaaatattctccaaagcattaactgctgtagtttaacactcaggtttgagcttatttctaaatctaagtttaggtaagttttcctttttcctctagtatttagattacatgtgtatgcacattgtcaatgaaagtgcaaaattaaaatgtaggcatcgttttagtacgggctgagacaagatcctgggccagggctcaggaggttcctcctgggaccccagggcagtccctagggttgggtttcccaatgtgtaaaatgagaagactggactggataatcacaggttctgatgtttgcacaagcttgtagtgctaaataaaagcttttaagctgtattactgaatctgtagtaccttttaaaaagcatgcttccaaacagcttctagatcattgtccctacagacactcaggagcagtctggagaagaacatatactactgaatgagagtgggattctatcttgattttcaccatctactagttgtaatgtcctgagttagggacagaagagcatgtctgtgacaagctgatggagggcttctttcttccactggaggatggcgtgggaccttcctgtgtgtctctccacccctcctcctgtttgtggccttcctgagggcccttcttactgtggccctacctgccactccggcctcatctctccctgcaggctatagtccaggggtggctttggcacatgtaggcaccccaggtgagctaatcattggtaccccctcaaatgaacactattccaatatttgcttacttcagaggagagactgagggctgtatgggtgaaggtggagcagggggctcttgtgaggagtgttgctctctgactccagtgttatccatccttgcagaggaagcaggatgggagggcactggcccatccggtgctcctcaagcacgtccatctgggaggcctgctgctcacctcaggtagcagctgtgtggagtctctttttcagaagggctttctcctaagtatagttttccccatcaccttggatttccaatggtgctagagcacctgtggagcctgggaccccaagccccctttatgcagccttatccagctattctgaactcctggctgcttccagaactcaccatgctcagggagaatttagcatgaagctcatgaagcttaagtttcaggatccctttcaaggcactggaagagattccagcaattttatatctattagtttgtattttttgacctcactgtaattgtgcatgtttcaggccttacaaaatctacttccatccatgcacatgctccctggtgtctcaattttctctgcagggaatcctcaatctgccctgaatcctggctggcttgttcaactcattgatcagctccaggaacctcctttaagaagcaccccacataattggggtccctcactcatccaacacacagttattgagtgcttctgctatgctgggtgctgttctaggtgctggagaaagcagcaaatacaatagggctgtcttgccctcatggagcttataatctagctgggcaaaggttgggttccttctagtgggccagatgccactcctggtccctgctgctgtcattcattctgctgattgttcacacatgtgccttccctctgactgccagctccctggggcagggccgtgttctttttatcttgatgtctctggcacagtgcatgtgaaccagctcagtaaatacctgtggagagagggaactcatactgctaatcacatgtgtacacaaggaagggaggccgctgttattttcctgtgcccaccctacttataggaaaatgaggatccttcctgcaaacttgacaacttcaagaaattcctggtggggctacgtagcgagagtcacgtgcatgataggagtgcaggaaggcttgtgtgtcccacacttgtgagcacgtggcttcagaagcccctttttgttgcaagctgccatctcctttttcctatccccagcaacagtactggtgtcctgttggcaacattgagaagcgctttgaaagtggaccaactttatctcagcctatcaagtagcttttatagccatgcagataaatcaaggaagtcctaaattctttataagcagaaatgacgaatttctcatttcttaaaatagctccaagagttgccatttagtttgctatttcaagaagtggcatttgggatttcagctcttcttaacatttaatcaccagagacacaagggcaagaaatgactggaaagttcatttgaagctatcacatccgaggcaagagcagtgaaattactgtgctctttggagcttagctcttcccatggttttcgaggttttgtacatgtttggccagaactgaactcagtttgtgggcgaacattgtgcaggtctgctggatccagaggaatctcattttcctggcactaagaacatttcctgcttctgattgccttttgatctggaatttcaatttgcatgatgttgggccgccagaccctaagcagcaaatgctgtgggagggagggagttccaagagattgaagggtggggggatcatggtggggccttttggggtcctgctttctggcccccatgggaggtgtagggaagtgtgattgctagaggcgcgccatgctgcccgctgccatgctcagtagatggggactggcggggcctcggtatcagtggctcacctgtgtccatgttgtcccttgagatgaggagctctttctccccacccactctgatcatgccacataaccctctgtgagcagtgtcccatggggtgtcctgcctgcctgctctcttcttcacaatccaagaccctgctgctgtcatggagctgccctaatgggagggggtcagaagtgcttttctctatcgcccacccccagctgtggttattcttcgtcttccctggcacacaccacagcaatactcagtcccatctacggtataagcagctgtctgtttcctttgggttcagcccctgaatttcagtgtctggatgcagttttctctatattgggtcattatttgtcttcctttgtgcatgtccctgtcattattgcctgttttattttgtatgtttctggaggtcaaggaaagtttttttttcttttttttttttttaaaacctatcatgcaagcaacatatttaataatatgaatagctctatttattataatatgtgtttacagtttgccaggctttgccttttccatgcattgactcagttgagtccagcagcagcctcacatgactgcacagctcggctttcctaaccatgctgccatcctcgtcagcattcgtgtggacacacgaccctatcagggcagagtcaggttttgtgagggacaaagcttacagaattttaggggctttctttaagaaaaataattcaacatttgaaaacaaaataaggcacggaggtgaacatttatttagaatttaaaaagaaagaaattttaaaaagctaacacaagccataaacaccagaaatccagggaaacaacacatttttatcaatgaacctctagatacacctccatactacttccctatagttttagggcttcatattcttttattgcctcttcatatgatcatgattttgtattatcattcttcattgcaagaacagatcagtgtttcccttggcatgattagtccaaatttgtattttattattgagagtttagaaaagtttcttctagttccacaacatctgggaatgtcacaggaatttttaggattggaaaagcttctgtgaggtttcttttgtacatgagcaatgcagtttgggggcattctcagtttgtgcaatgactaatcttacataccgccaagtagtcctggggccacataccttagaacatgtctgaattgtgccatggcgtcccatcttctgtgtcatgacattgggtggacacagtgggcacgttcctggaaatcttcctaagccaaggtgcccagcaacaatggagctgtatgggaaccactggcaagctcttttagccccacaggacgtgtccctggggcctgagtgggatgctgagggtggcaaagataacaagactcagccctgccctgaggcactgatagtggagctgagtgtttgcaggtcacagcaagccgaggactgtcatgagaggcatcccaggactgctgctaagtaaggatgtggcagcaaggcgccaaaggccacctttgtggggaggagggaggtggccccccagttacatgcgaagtgctatatgcctgcctggggctagagcagcttggctttaacttttttgctgcattgccacatttgcgttctttgtagaccgtcacccaaggggctgcaggactgtgacaggtgtagaggtgggaggggcacattatccctgtagagggagggactggagctggctcgtgtcagaaacagtggacgcaacattgcctctttgctgggcgggcccccgggcttaccatgagactggaaaccttgcatctgcctagctaagtgggggctctgttgttggtagggagttcaaacttttgcccacttgaagaattctcattcttctttgctctctccaagcatcccttccttagtaaagtgaagaaacttaacagcccatggagggcaatgggcttgaccttagctctgcatttaacttctgccagtacctctcactacgttgagctacatgtttacaggcctggctcttccactagcccagggctgcttcaactcagttccacatgaccactctccagggaattacagccctcccctcaaagctgtgtatacaatcatagaaagcaaagaatgtatacaattttcagggggagaagatccaggctctcaaaggggtctgtaaccttgagaaggctcagtaccggccttgtttcttcttcctccctgaaactgaaaattctaatgtagttcctggggcatcatgattgatcagggtttttccagaatcccctggagagcatgttcaagtataggtagttggtccctgctcctggagctcctgacttggctctggactggggcctcagaatttacgtttgtaaccagttcccaggcgacgctgaatcaccagttcctgggaacccactttcagaaccactgttgtggactatttgtgaactgaaggtactacctctccctttctgatttcacgggaaatcactttcagaaccaccgttatggactatttgtggactgaaagtacgccctctccctttctgatttcacaggaagcctgaggaatgaatgttcacagataaggacttgagcctctacgtgacggggaaagctgaaggacttgtacatagaccaagttagatttttatacactataaaagcagcagtcacccagtgtgtatgttctgaatgtcataggcttgggagtcagccaggcctcaccatgcttagggaaaaatagtatcctgaaatattcacaattcaaactcatgaattctcagggtttcaaacatgatggtgctgatggccccggagcagctccaccaacaaccagaatttgggtaattctggttttcttttgaagatagaaaattaagaacttctccctcggaagtctgtcaccaagggaagaattgaatttgagcatgttgcgatagctttaaaaccacggctgtgtgccagatctgtgccaggcctcgttcttgcaaataatagtggggaccggcagtctggtaattagcctatgtcattttgctgttagcgtgatgttcttgtcactaatcatgtctcaggccaatcagttccctaccctagtgggctgtccccgcctccatgccccaccagcacctggaaaagcttagcggggctgaagaacagtgaacagctgtcaccagtgaatcacagtttaaaaaagagttgaaaataggcaattatcctcttaacccacaatttggtagatacagtggtgtgacttcccacagatccacctccaagtctcccaagcccctctcttctgccatttctgtcttcagtttcctccccagggtggctccatccctgcctctcttttcgttttcctcccctgcatctccttctgctcccttttccctgtctccctcaccagtctctgttctccacccattctcctctgattgtttctttctttcccccgtcaaaggacacctgtagaagggaggcattgtgcccagtatttgtatttgaagcaagagctttttgccttgttcttaacttaggcagcaggtgagccactcccagttgatcccttttccctggagtcagtcatgtgtcccggaagtgcttccagcagctgctgaagacctctgccctatgaggtcactaggagttctttcattaagtgacctgaggtagggtttgtacaagttgaaaatttttatagtccttgattcatgttaatcctccataagatttctcttatttttcagtcagtaccatgagttttcctggtcatggtactgcatgaccagtctttaacagaaatgttggcttataaactgtctttcacacatttactatggttgagtattgctaagcacacattgttcaaagggcagcccagtatgggagaagaaagagttctgtttaacagaagactgtgtcctgtcccaatccagtcctgctgggtacttggtgggacacttgtagcaattagcttaacttgagatcctcagtttccagcctcagttgttgagtggtaattgtgacagtaaaaacaccttgaaagttacactttgtcacacaaaaggaagacagtagccacaacattgcatcctttcattagatacctccaagatacaccttggggggaaacagaaattcatctaattaaagtattatttggtgccctaaatacatgaaactgacccatgaatatttttattatcaaacattttaagcaacccaagtttaatcagatagatgcaaaaaaatcattaaatatgttaagagttgtaaacatatctgtatcttatatgtccagagacaggaaacacatcaataattgaacatggaaaattaatataaagaattactaaattggtgaaaggggattaactctattagggggtaaagataactctaaagcaggctgtgcccttgggcaaaatctggctgctgcctgtttttataaataaagttttattgtaacactgccatgcccatgtgtttacttattgtctgtggctgcttttgtgccgcaatggcagagtttaccagttgtgacagaaactgtaaggctggcaaagtcctttacagaaagagttgtcgactcctgctctaagaatacaagaatagtaagttcgggaacagagatccccaaggaaggaacaaactgggaagagcctctcacccccacccaaggcagagattcaggcctagctggagagtgtggttgtggcccagcaatggtggctggtggccaagtttgctgaggtgccgtgggctggagctggtgggcagggagccacccactggggggaagctgctgaaggggtggcagcagggctttttagatggctgcccgcagggatgccagtgcagcttcctggagggtgtgccctttgtctctcccagaaagcctcctggctgccctgctgtaggaacaaagcccaaaaaatccccaaacctaataacattggcacctgggaacagcccattctcagcagtgtccctccaaccccctgtccagggctcacaatgcacctctgccttctggcagtctgaagaatcatgggccttacctggggagagtggagccaagggggctgcacccagctgaggattcagccctgcccagcctgtgcctgtgcctgtgcctgtgcaggcagctggggctgtcatgaaagagtctccctggcctgtggttatggggcagccaccacataagccagggagaacatggagtctgccccagtctgcagtattggtccatctgacctctttgtaatggaattttagaaagctgtgtgcatatttgggttttattaggaatatggttacggttcctagggaaaatgttattaatcacgacatccattcattttgccagcaagcatttattgactggttactctatgcagtatgacaaacaaataaaagagtaaatctttttttttttaattaaaatattttgaaaaaaattttctgggcaattcttatttaaaaataatttgtataaagttttttttttttccttttttgaatgtaaatacagtttactgttaccaacactttatagctttaatttttttgattttgcatatttttagtctctgtccacatagcacatattttacttaattataataattgtgtacttgtttggtcattgctttttttcttagcatgtcaaaacatctttgtagagtgttgttaaatcaagtaattggagttaaatatgagcatgtatatgtgcaataggcaaagcaagttgactgctacttcaggcaactccagaatctcagcagctgaacacagtaggtgtttcagttcttgctcctggggcatttcagtgcctgtttaagcaggcggtcttctacaaggggattcaggacccagactctttccatcttaggctccatcctttcctcaggccacccagttctgcgttggatcctgtgtgcgtggctgcagagggaaggaggaggggccacgtggaaggcttttgtgggccagatgaggcagtggccacatcttttccactcgaataaaattggttagaagacagtcacatgggtgcaccaaaacacaaggaggctgggaaatgtggtccacctgtattggaaaggagacaggttttggaaacaaatagcaagcctcagtcacaattgccaatttggatgccacatacgaaatatccttaatatacttcttatataaaaattgtcattttaatatataaagcatttattgagattgtatatatcagatgattatagtttcaaaaataatcttctagtaactattgatataatggacttactttttttttaatttttgttttttgagatggagtcttgctctgtcacccaggctggagtgcaatggtgtgatctcagctcactgcaacctccgcctccccagttcaagtaattctcgtgcctcggcctcccgagtagctgggattacaagcgtatgccaccacgcctggctaatttttatactttttgtagtgacagggtttcatcgtgttggccaggctggtctctaactcctaacctcaggtgacccacccatctcggccctcaaagtgctgagattacgggtgtgagccaccacgcctgccctggacttagttacttctgataacatcttctatatgcctattttagcatttggcatactgtagtatagttagttgaatatgtatttttatccctaacctagcccagtcaatgcctcgcatgtggaaagcgagccataaacaaggtggcagtgactggcgatagataaagggattttaaccaagagagctaactttggaaatagctagaaaagccatattctcttcttccctacttactcgttacctctttttcctgctcagtgcatgctagggatggacgtccccatcccctcggattcacccatgagccctggtttaagtagtacctgcccccctggctgtgacccagcctcttggctggtttgggctcagctcattatctttctacctttaggtattacatattaagtatagatatctggggataggcagggatattttgagactcagagaagggcgtcttggagccccttgtctgaaataatgagtcctgtggatacatttaggccctgggccaaggagggatggtatcgtggctggagccgttctgggcatctggcctcaactgccaggccatggctggacacctaaccagggcaactctggcacaccctaaagcttggaaggggacatagctagtcagggatgacccgagaaatgactggaagctccaccagaatgcagagcttcctttgtgcttaaataactgaacaagcatcactctgtgtagcaggacaccacccagcattttttgtccctttggaaacaactcttatttctgtttctttgtgataccaaaactagcatactctaattgtagaaaatacaaaacatagagtagaacatactaagttctttatcttaagaaatggcatttgtgtatgagaatgtcttgcttatcttttcgccctccaggcaaagccaaagctaattgagccactcgactatgaaaatgtcatcgtccagaagaagactcagatcctgaacgactgtttacgggagatgctgctcttcccttacgatgactttcaggtaagtaacgttatgtttctatccgtagaaccacgtgtttgatcttaacaagcagtatttttctatgtattgatttattgtttggttagttaattattattattattattttttttgagacacagtcttgctctgtcacgcaggcttgagtgcagtggtgccatcttggctcaacggcaacctccgcctcctgggttcaagcatttctcctgcctcagcctctcaagtaactgggattacaggcgtgtgccaccatgcctggctaatttttgtctttgtattagagacagggttttgccacggtggccagggtcgtcccaaactcctggccttaagtgatctatctgccttggcctctcaaaatgttgggattataggcatgagccactgtgcccggcctaattatggtttttaaaagatgaaaataagatgttatttaagaaagaaaagttattttatattcttccaagcatccttcatgagttgataatttttaatggtattatttttgcatattaattataagtatgccaaaatgtgtgtgtgtgtgtgtgtgtgtgtgtgtgtgtgtatcttgaataaaagtgctatactctgtctgggctgatttagtgggcacaagtgcctttctgtcttttgagatttgttttgatttagattttttggccaagtaccttagaatcttaatgatgggctttgctggggagcagtgggagatttcgtcatgcctttttttaggatggcatttgggagcctgccttcagaggccctgcactctgtgtgggctcccagcaaagcgttcaaggttagccaagaatggcctgaagtttacctctgtagtgtaatgtgggtgctgttccttggaagaaatgtggaggactcagcacagctcctgctgtgtgccgctctttcaggctatggcctgtggttaagagactaacaagaagctgtgaggctgttgaggaatgagaatgacattcttcctccaggaaacccggtggtgttaaatgccttgcagcgagccaccttggtccatttggaggttctggttactttccttgctctcctgggacctgatcctggcacttctttctcctctcctttgatgctcttagttggacacttctctacctgatgctgttaccatttaagccctgtcttttgtgaatcgagctgcctttttttttttaagcttcactgattctttgttgtttgattccaaaagtgttacatccatgtacaaaaagataaatgagagggaaatattgaaataattgacatgaaaagcctccccacgccttctaatcccatcccacagaacatgacttaactgtatacagctctgtgcatacttgtctttagaaacttccatgttaatagaaattgttaaattacgatccttgaaggttttttcccaccaaatttaagcgactccagcttacaacagaggtgagaattttcacaaatgttcactctttctaacttgttagagatacctgggccccaaaatgattattctttagctctgtcctgcataaaaggaatgcccatgggaatgaaattgaccattcgtgtggtgttgctaccaaagtaacaggtaaatgggttgaggtcatgccaaacaataccatgctttgcatacttcatttcatgactaaactgcatgggaacggactaataaatgagaacctctgaatgatgccttttgcctgtgatttggcaacaaatgaaaagcaaaatcaaatgattataaattgtactgcatgttgacaagattttcctgtagtgttgtctgaggaagctaaaggttatctcaaatttctctcaacatgaagtatgtgttcttcttggtattaattaaagtaacaacttttttgagtttgcaacctagaatgaaaaattctatttgtatgactgagataaaattgcttaagaaacaaaccaaagaaacgagatacagttagttgagtgtcatctttatcccaggggaacaggtatctggatgtttaagcagttgcagaatcagacagtttaaactttgagaaaacttctgtgtcccctttgcttttaactactctggtgatagcaggcacaaatattctaggaaaggcaaagaactcactagcattttgttggctaaggtgatgagcaaatattattttctgtttggggagaagttttcctagagatttaggagcttgaattggagctttaatcctcatcacaggaattgtgatgggccccagtgaagtttgggtacaattatttgttttcttatagactcccactttcttatcaggtaaagccatgtactctgtgctttcttgttaaattgtctcagtgatgttattaactgtctaattagctggatgagtgaaaggtcttaacagtgccacagattctttctatctgtgttttcttaggcagaataagagcagaattattgtattattagaggcagagggaacaaattagattggggaaagtgttttatttcatatggaaaagtaataccaagttggttaggaaatggcagcagcaaaacgcatgctgaggggtgatttactgcacttaaataatttagcagtataagttaactattaaaataatagaacttggtgtccatttctgccaaatatatttgaaatgacaatttactaaaatataagcatggatagtggtgatgcttgtgtacatttttcaagtaggcacatgttgatcttgagcctttactggtcagatcctaaaggcatctacatgttctctaaaaatgagttgtgtcaagaaaagatttgcgggttgcatgtagttgcctgaggatgacagaagagtagttactacaacagcagcaaagaagagagacatgaagtaaacgtggatttttaaaaatcaaaagaataggccaggcgcactggctcatgcctgtaatcccagcactttgggaggccgaggtgggcagatcacaaggtcaggagtttgagaccagcctggccaatatggtgaaaccccatctctaccagaaaatacaaaaattagccaggcatggtggtgcatgcctgtaatcccagctactcgggaggctgaggcaggagaatctcttgaaaccaggagacagaggttgcagtaagctgagatcgtgccactgcattccagcctgggcgacagagtgagactccatctcaaaacaaacaaaaaatcaaaataatagttcccagccatcaggttattgatgaagtaggctgggcacggtggctcacacctgtaatcccagcacattgggagtccgaggcaggtggatcacctgaggtcaggtgtttgagaccagcctggccaacatggcaaaaccccgtctctactaaaaatacaaaaattagccaggcatggtggtgggcacctataatcccagctacttgggaggctgaggcaagagaatcgcttgaacctgggaggtggaggttgcagtgagccaagatcgcgccattgcactccagcctgggggacaagaggaaaactccatctcaaaaaaaaaaagggaatattaatgaagtaaagtacatgtgatctgccatggccagggacaggaatgccatggggcctgcagccgtcactagctgatggcccttctttttgcagaatcagatcctgtcgcttggggatctctgccatctgtgctttggcttcatggttctccttgccagcagcatcttctcttctagatctttcctaccctttagagaccacttgaaatcccatattgtctgaagctatttaagtccacagaaacttttccccccactgtctcaattcctttcctactgcctgtctgcaccgtgcacataaacacttgagtatgtggtcttggctgttcacgacctacttcttaggcttcttgcacgcaggcatcccgccccgtgctgtggtcctgagaagggctggctttgagcctctgttctcccacccacctgcccacctacacatgcacaaaatccctttcttgctaggtgctagggttgaatacccattgcttaccttactaatagtaaaatttttacaagcattaggttattttctttgattcatcaagtaaatattaatactgtttggaacatgtgatagtcccagcgactagatttgtaaaaatatttgcaggatcaatgatttggtttggcagaagtaggtaatttctaaaattaaaaaatgcaggtaaaacagggactggagaggagtattttttcctagtgattaataaacctttatttttcttattgttttgttgtcttacccagtttatttggcgtaaatctgagaacttactttttccatgagcaaagttagaggtaaactttaacaagcagttagacagaggtaatgacctttagattaaaaggttttaggtcaagctgtataagttgacttgtcgcttaagacatgatgagcctctgtttaactgaaagtcaagcccaggacgcctgccttttccatcaaagacatgggatttgggtggcagctgactattgatttccaatgacgattcttcttcaagtggaggtctttttaccagatggtcctgttggtggggacattgttaaccctgcgattaaccgacggcatcttcatctggcttttaagctccttgtatcctgacttgttacacagcttacttatgcttgtgcgactatgtaaagtgacagtatatgagaaaggtagtgagtagtaagaatgttgggagacaatttaagctaccattcatatttcataaaaattagactttggtgtctggtgtaaacaaacagaggacagagcttgtatggaaggataaaaagagcgtgttgggccgggttcgttggctcacgcctgtaaccccagcactttgggtgaccaaggtgggaggattgcttaagcctagaagttcaagaccaccctggacagcacagcaagacctcgtctctacaaaaaataaatttaaaaaatattagatactagaaagatggcagagcaagagcaaagaaaaatccctttggttctagaaaatctgaaaaagaggaaggcttatcaagccctcaaagccactcaggcaaagcaggcacttttagcaaagaaggagcagaagaaaggaaaacagctcaggtttaagcgactggaatcattcctatatgattcctcgtggcagaaacacgacaagctgcatctcagacaactagaagtgaaacctcatgccttggaattgccagataaacattccttggcctttgttttacgcatccaaagaattaatggtgtgacttcactggtgcagagaaccattgcaagactttgcctgaagaaaattttcagtggtatctttgtaaaagtcaccccaaagagcctaaaatgttgcttatagtagaaccttatgtgaactggggatttccaatctaaagtctgtccaagaactcattttgaaacatgaacaagccaaggtcaagaatgagaccatccctctgacagacagcacagcaattgaggagcacctgggggagtttggtgtcatttgcctgggagacctcatacatgaaattgccttcccagggaagtatttccaggagatctcatgggtcttgcaccctttccacctctcggtggcccatcatgctaccaagaatagagtgggcttcctcaaggagatggcctcacctggggtgaacacatcaatcagctcatccaccagctgaacccaacccagaatatctgaaagcacagtgtagtggaagcgtgtgttttgggtttttttggaattattatcaagtatcttcagataagattatttcctgcttaatcttcaaaaactggaaaggaagggtcgaagaaaagacagtaggtgatgttcatggcagacacctctcatcacagtcatttccaaggaaaaattccaatgttttctacattggctgccccctcatctgaaatcagcatctgccatggaggaatggaggagggagttctgcttagttgcatcttttgtcttatggtttattattgtgaatgagtaactcaagctatgtacaaggctctgtaagactcctgtaacagtggaccaagcccaggggcataattgagtctggaggttcctggggccttgttttgaagacttgaaatacacataggaagaaaggtacaaaaataaatactcagttgtctctggaaaaaaagaaaaaattagccgggcatggtggcgcaaacctgtggtcccagcgacttgggaggctgaggtgggaggatcacttgagcccaacaggttgaggctgcagtgagccatgattgtgctgctgcggtccagcctgggtgacagagggaaaccctgtctcaaagcatgttgtataccacttctggatatatgccccaaagacttggaagcagggactcaaagagagatttgttcacccctattgagatcagcattatttacagtagccgaaagcgggaagcaacccaagtgtccatcgagggataaatggagaaagaaaatgtggtgtttacaaaaaatggaatattattcagcctgaaaagggaagaaactcctgtcccatgttacaatatggatggaccctgaggaggttatgctcagtggataagccagtgacagaaggacaaatactgttcaattccacctatgtaaggtccctaaagaatcaaattcattagaggcagaaagtagaatgctggttactagggatggaggtggggagcaatggggagttattgttcaatgggaacagagacgcagttggaaagatgaaaagagttttggagatggatggtggtgatggttgaaaaatgagaatgtacttaatgccattgaactgtacacttaaaaatggttaagatggtatattttgtgttttatgtatttaaaataatgatttttaaaaagcataggatttcgttataggatttctgtgctatatttatgggtgggaaactgttgtcatccttagaactgtttgcaaaatcaggttgaggagtgagtccttaggtgcttttcccactgatattcatggtgtattacctatataaatgtcttagcaagagaattgaaaagaaaggataggagtgcaggtcaaagattattcaaaattgacaatcctagaaattttactttttggaaatgtttgaatacaggagaatcctagagtgttctcagcattgtacagaaaaatgtggttactctatttccctttcaataacatcctgagttttatttttcctctggttcttttcctcttctacttacatgagactgataatgatctacaaatcactgacatggagaggaagctgtgcctgctgcttacaaaggcctggaagtccctgatctcatttcccatctgtccttttgaaaagaaaaaaacttatttttcacgatgttttgtcctcactcttttcttatatagagccaaaagaaaaaaaccctcaatactttgtttttggctttttattgaaaagtgttcttttcataaattcctcaaaattctcatcagtaagaattcagtggccaacagtgtaactttctgtgaacattgtggtttgtgggatattagttcatgtctaggcttagacctaactgaaaaatctggataaattatatttctgggccgggtgcagtggctcacgcctgtaatcctagcactttgggaggctgaggcgggcagattacctgaggtcaggagtttgagaccagcctggccaacatggtgaaaccctgtctctaccaaaaatacaaaaattatctgggcgtagtggcgggcgcctgtaatcccagctacttgggaggatgaggcaggacacttgaacccgggaggcggaggttacagtgagccaagattgtgccactgcaaccccagcctaagcaatgagagtgaaagtccgtctcaaaaaaaaaaaaaaaaaaattctgaatagacacatctaaaccttgaggatatgagaattttaattctagttcaagtaatgccttttacaggaaatagtgattgatttttttttttaattatcatcacatagtccttaaaaagaaaagcttacttttcaggtagcactgatcagctgagcttaagggtatatttatttaacttatgtttattcttaaacgacttgtgaaaggactcagctttgtgaggtgcttggaatcataaagataagctaggatccttgctttcaaaatgctcataacttaggagaggagataaaggtatgtcttaataagcaggggactaggaccagtgtcatgacataaatctagtcccatgggaatctactgtggcagtattatttgagagtttagtggaacactcaagtgctgtcagctcttgaagtggctggaaacgcagaagtccagccctgagagaagtgtttaaaaaggaagatctggactcatccacagaaaagtgagacaggcatgaaaggggccgagagcatgacggactgaagcctgggctagtgccttcatttaggaaaaagcaggggaagcagagacagaagttaggataagaaccaggaaatggagaagaagagttggaagaaggcaggcagagagggcagacagtctctccatggctagggaggtcccaggaaagggctgtggagttggtgaccaggaaggggtaaagaagtgagtggggagacacaggttagagtaagctggaaacagaaagaagaaatcagagtggctcagagcagtgacaaggtctgcgggaggttttaccaggattgggaaagcaagaatgagctgagaagggtgaaacccaggcatggagaagagatcgaagatataggataatgtggtctgagttttgaagcagggttccgcatggggtctctggggagggaattgagggtcttttagaggaggagttgaggaaggagaaatactgccagctccaaatggaaggagagcattgcgtattgagaagtgtagcggcagattgtgctgagggagctaatgtcaggctggcctggggcagggggagcttgggtgagtaagggtttggaaagcaggccatggagagtggcagggggagtcaagtctcaccagcttgttctccccctgttggaaccatcgccacagcctttgtctgtccctcttacctggattaatgcgagagactcctctcaagtcttctgggttctctccttgccctcttccagtctgtcctaacagtgtagctagagagactgtttaaaaagtgagtcagaggatatcattcctgtgttcagaatcccccagcaaaggccttacagtggcccaagggtccctgtgatcttgtttcccatttactcccaggccttctcccagcccgcctctctcaccatccgctgtctgtctgcagccacactggcctctttgggctcctgtctcccccgcgaggcttgggacctatcctgtccctggaaattctttacctggctatctcttgccccctgcaaacctttttccaaatctgacctttgcaatgaggctgttgctgactgctacagctccacccctctttggccttgctggtcctctctaccttgctctgatttctttttttctctccctgtctcttaacagcctctcacactggtatatgttcttgcttcttatgtaaactccaggaggcagggatcttagtttttaagcatgtagaacaagtggtagatattcaataaatatttgtagaattaaacaaatgaattatcaaccaagaggggggtctttccacttaagatttcagtgaaaacaattagccttgttggaaatgtcagtcacctgggaatagagaagagaaagcagaggatggatggctgtgatggtggcaggatgtaggtgagagtgagtgacccaaggtcctaaaatgacctcccagggagtcaaggctggagagtctttggaggtggaccctggactgggaaaagaagacactagagggcccagaggaggaaagagcaaaaatacttggtgtggggtagtttgaggagtaccagggcacactcagggaagggacatgtcagtgtctgagagctcacgggaggaaggtgtagtgacaacatggaccatggtggagtgactttagacggctcttgggtgaggagaatcagcatgtaacaaagcattaaatcatttggaagaaattcagaaaatcgtagatgtacattcagcccacttaccaggcctactaaacgtcaatcagatataatatcaaattgaaatacgaagttaagggtagagctcttcaagtggctattttgagcatttaagcttgagctggattcccaggtccctggaagatgtatgttataagctttcttattagaaatattgtaggaaaaggaagtgatttacaaacatttagaatcattgtttccttgactgattcatttgttctttaatttgtttaaaaccatcttgcttagctcaccaaacttcaagaagatcagcattggactgtgcaaattcagtgttattttcctaaactgaaggaagtgttaaagatgaaaactgcttctgaaaaatatcttctatgcctgagtccaaatcagcaaccacagaaacatattggggaagcataattaactttgtatttgtgccagcctttctaaatgaaggtggaggcctgataggctaggaggatgatctggtcatgaccccgctgtccttaagtgaggttcagctgattggcacctcaaagggttctcccgccttcctcgctgttcccagggtatccctctgcatccccatgaactgttacaggcaggggagggtgtgtgggcagctgtgtccccatgtgccctggcataggactgtaggggatgtgattgaacatgttatgcgggagcaggacacacacatggaacacagtgtaatggtgccctcaggagccagagaactcagcggaaccatgatgcctcctgctgaaacagttagggtacaagatcagtgtgttgatttttatgcttacaaagtatttcatcattttctttattttttttttcctcagcctgctgagggtagtagctttttttttttttttttttctcatatagtggacactgtgacgtgatttttgctccatattgtgctcaggaaaacctaggattaagtgggtagttgacattaactacacatgtaactagaagaaagagagcacacacgtatgaaataccacctgtatacatcaagtaaatgtaagatgttattctcttatcctgaatgaaggatattgatgaacccagtagtccatcattgtatgtttgtgttccccatgagaggtcacattcttcttttctttttaaaataacatttagctgacattttaaatatgtcagagagaatggtaaaattctacaattggtggaattggataaatgcagaccatatttgcaaaccaatgaggcatagaaggacaattttatctatgtgattagtgtatatgtcttaggatattaaaggtaatcaacaggcatggatagaggaagatttgaactaaggatgatatcttccgtcaggggtagcttaatcagatggaaatttatgaagtatatactgtgtctctagcattcatcccctatccctctttattatgattatttgtaactatgaaactgctttttttcccctaaatagaaaataaagcctccatgagactagaaagctgtaatttttttttaaattgtaaaccatagttttttgaaaattcatgtttacatttgccaacattcctacaatagtattttatccatagtagacacttaataggtattacacaaatgaatggatatgagatcttggcaccagtggcctttgaggtcattagagcatatctcaaggtggcaaatcatgggagtagaagtaaagtagacagtaaatttgcatgcaaaaacgaacacacacaaacgaagagtccttaaaggaaatggaaatccaggttttggccttagaattcctagatgtcatttaacgtatgaccaggcacaaaatctctatggttcctaaaacaaaaacaagtccagctatgtctgtatctctgcctttttctaccagggttgcctagaagaacctagataatattgagtgtgtcccacatgggtttgagcaacacccttgagtgtgtgcatgagatccaaagaggacagattcagtaagtttatcaaagtcccctgatgtcagaagtcttgagtcacagtgccttccccatctgcttagcattatatctacaaagctgactctccgctgtgtttgaagtaaggctctggatggcagcccaggagctgaaatgctgctctgacaggagcagtgtggcgctggtcaactcagagggatttgagtgaaattatactcagtgcataagtgaaaccttacatatggatgatgggtggcacagtagggagtatgtcttcctaagacaagtcccgaaggaaagttcactggtgtatcgagatgtataaatacagtcatgcactgcataatgacctttcagtcaacagtggtggtcccatcaaattataatgctgtattttaccataccttttccgtgtgtagatatgtgtaggtacacacatacttccattgtgttacgtctccctacagtagtcagcacagtcccatgttgtacaggtatgtggcctaggagcaataggctacaccctatagcctaggtgtgtggtaggctataccatctaggtttgtgtaagtacactttatcaagtctgcacaaggacaaagtcacccaatgatgcatttctcagaatgtatctctagcgttatgcaacacgtaactgtgatggacatgttttaacttgaagcatatccactgtgctagatgttcacacagaattatggtccttttagcaactaaaatagaattctaaagaaagacaaccagctgggcgcggtggctcacgcctgtaatcccagaactttgggaggccgaggtgggcagatcacgaggtcaggagatcgagaccatcctggctaacacggcaaaaccccatctctacttaaaatacaaaaaattagccgggcgtggtggcgggtgcctgtagtcccagctactcgggaggctgaggcaggagaatggcgtgaacctgggaggcggatcttgcagtgagccaagatcgcgccactgtactccagcctagggggacagagcgagactctgtctcaaaaaaacaaaaaaaaaaaacaacaaaaaaaaaaacataaccagagacacatacagacaactggaaaacaaaagaaagtaaagaaagtacacttacttacacctacctcaaggttgagtgcaatgcacatgaaagagttggtaggtgctttagacactagaggtagtgacaggacccaagatttagtcgtatgtccacaggggttttaactcaggtctgtctcttattactctgatcctttcataagtgataaaccttcctaaaactcacttttcttaatctgtaattcagtgatgatatttcccctaaaatttggttctcacagatgtttgagaatccaaagagataactaccatccaggagagctctgcacgcccttgctactgcccttccattgcttggcagacgccaggttactagggagcttattacagcctctattctcgcctctagggaatgtcattttatttttgaggaggctgtttttagttgccatcctcaactttagttgttcagcaggctcaatcccttactaaatgggaaggcagacataccacgtgggccccaaatgaccacaaggctactcctggttttctgggtaactctcctgtcctcagctgtgcagtagtacttagcaagtgattttaaaattgcttctttgtaagaccaaaaaaatatataattctttacaaaaatgcacttaattcataactagttattaagggttctgaacatttatgttatttagtttactgcattttaataaacaatcgtgtgctcttccatttaagggatttgagaaggtggcagaatgaaattcatatgactctcaaagtctactgaaatctgacttttcaggaagcagtacattatttggtgaaaggaactgtctaaagtctcacgtgttgctgagacgctgtctcatttggaacctcatgtgatctcacaactaaattgcgcagtccctcttttaaagtcccaacttcccatttactcagcaacattcatcttgtgccaggtgttctgctgggtattggagaattaaagatgaataacatggtcagattctcaagtcaggcaggagacacagaagtatctttgagtaatcttagcagaatggtacgtgttcctgagaccagtctgagcaacttggtgtcagtcagaggggcctggtgcattagggaatcagaaatagtccatgttgctggactgttggagaagggcagaagagtccagaaaagttagtacggttggtcacaaaaggtcttcggtcatgctgaggagtttggattttattctggtggcaatgaggcgtcactgaaagaatttcagctgaggcatgatgctatcagatgagagatttagaaagacaaatggcaggtgtgcagagaatagataagagggatgatggagggaaggtgggcctaccagttagggtgctgcactgtggtttgtgcatcgctgtgggtactttgacatcaggcagagtgaagggtggcactgttgaaggaccagagaaagaaatgggggaccatgcaggtgccagtgaagaggagcagttagagaggcagagaaggcccccccacctcaagaccaccaacaagatggattatagaatctatgttaggtgagcttaggctcaaatagtccatgagaaatgtataattctctgctcgtatcaagactcagcccagctagctgcagtgagtcacgcctgtaatcctagcactttggggggccacggtgggatgatcgctggagcctagaaggtcaaggctgcagtgagccatgatcacaccactgcactccagcctaggcaacagagcgagaccctatctcttaaaaaacaacaaaaaaactcagcccttgtaatgttttaaatgtgttccttgggaattggctttcattaaatcccttccagaaacctaaatggaattccttcttcagcctctctgtcctatgctttgctccttttcttaattattagggaattaaacatcgaggctctttaggcaacgcttgcctgaaaatggaatttgtctgatgttaatagaacatcgtgggttaactgccaagacatgaattgtgaggtaaaatgtgggaacgccctgtgtaaattttagtttccagtctagcttggtactgaatcctctcaaaaagcaagtcatatgctctgaaacaaatgcatctgccagataacttggaaaggtttcatcacctctgcactcagtaagtttcagtgatgttcccagagttgttgaatagtaatgtttaatactgcactcgatacaaaatatttaatgtacagaccagtgcaaccaagtggggtttccagcagatatcaaagggacataattctacagagacgtgaggcaccatgcagtttggctgaggcctagagacaaaaggaaggagctcttgtgagccatctaagagggagtagtttgcaatcagagataactttggaacatggacgtggatgctctccatttggcccagctgagaacaataacaattgaacctagggttaactcagtgagggagatgggccaggcccagggaatgctcctgaagagctcagtcttgctcgaacctcctgggctttgctttttggctgcatccaggtccgtccgtctcctgagctctgcatattgtgccttgcccccgccccaggcccaccctaagatttgcccttccttcagcagattcaagtactatttctctgacaaatgcataaggtcctcaggtgtttgaagagatagttctaagtaaatgaaaacaagcacaaaaataagcacaagcatggatgctttacatgagattacaaagaggggagagaggattgatggctccacagtttagcctaagggtagactggaattgatggggtctgaggcctgctgggcttctctaacaggtggtcactgtggaccccgggccttcttctctctgattttaggtcatcctcagtcctcagagagcagaccatcttagaggcaggaccccaggtaccctgaaattaccctccagctccctaggtctgcagtcctgctctcactgacagtttcctcctgaagagaagcatcttcccctgtcctgactcagtgtctcagttggagcgctgtggtctcccctttcctcgggttggctctcgagaactacctgggaggctgctgggtactccccatctcttcctgcatcagagcctgtgctccccttttgggctgtccctggtgtttgtttctctgttgagggaggacactcccagctctctgcacctttgagcagcagagatgtggagacactttgtcactggttccagcagctggctcaggttacagcccacccacttctctgggagattgtctttagctcattgctcatatggtcccagggcaagggtgggcctattgttggtcttttaattaaaattttataaaatatgatgttttaaatatcccaaggatttgcatacttcccaccaggaattaagagggctgttttgtcatagtttaagcccattgtaaagtaattgataaaaaaaatccagtgccatgagttgagagggttagaaaaataatagaaatctttgttaatactcactcttatatttatttaaatctacatagtgaatcttccctgccttttacccaacgattctttccataaagaaaaataattaaggtaatgcaactgtaattcaaagcaaatatggtattcatcttttttcttttttctggatgccttttatgttttagtttcttacaaagcaatttccagcactcagataaaccatttgagaggaacagacttagaattccatattcacagaactgtgggatttttaaaccacaaaggaaacctagagatcctagaagactgttctgtggatgtggaaagttcaaatatcccccaagactgcacagctaattagaggcagagctggggtaaggactcaggtttcctggctctcaactcaaatctctttccaatatcatttctcaaattctaagatcagaagttgaatgaaacgattcgcttcacatttcttgtggtttgaaacatgagcttctcagaatctccagcttcagtggggtcagggtaacgtattggctgctactgatggaggccagacagagccccggccaggttggggtcaggaatgtcgttaggagagagggattccacatttaagctgcagagagagcagtgagtgatgatagaagcaggaaatgccagaggccccaggggtcggcccaggtgaggaaacaggtacctccacttgctccctttaggtgggcctgccctgctgcccagggctaagtggcttcccacagtggctcagaaacatcaccgtaaccccagtgtttggaggagatcatttcaactaagaggaaaaaacttttctttttttaagtaaaaaggatctatttgaaatttgtcattccaaactagacttggagacagttgtaaatttcactctttttattctgggagcaactctgtgcttttctagctcattctgttaaaaaaaaaaaaaaagcaaaacaaaaaactgtcccataaatattgagactggggctctcaggtatctgtgcatcctcatatgagccctttgggaaaggatgtcacccttttttcttcctttttaattatgcctgtgattttgtggaacttcctataagactcctgtccatatttgctgaaggtaactaagaatttcttagtgtcaaaggctacgtgtttaacctaagtaataatattgactgaaaataatttaccttctgttataatagctaggaaagggcttttatctacctatctgtctatcgatcatctatctatctatctacctatctttctttttttctttttcttttccttttctttcttgcaggtgcataccttggtaaagggcttttattttgaaattatgtttgtgctgtgaagatttctatccaaatagttgtgtgagatgctagcaatgtttaggtttaattttcagaaccatattacactaattatggtgtgaaatgttttttcccctttcccttttcaaatgtacagatttattagcggaatggaaatggcttgtttccaaacatagacataggactggtatgctatgaatgcccacctttatgttgggcattcaaatgatgttgggcattgggtctatataaagtggatatagacctatcttttagcagaaatatgattttaactgatagaaaagtagaaaagaatgccacagctatgaaaaagaaaacttgacttattgttgagaagggctttagtgcttttggagtataaatctcttagtattgacttggacttcgctataagctaaataaataaaactacagaaatttagtgtgaattagtttggcataaagtagatgattatctgaatatgacttttaatacataaaatctgtggagaaattaaaacagagtgctcactcatgctatagtcttcccttgtcagttcctataatggaccagataactttttgtaataatagggagaaaaaacttatatgcaagtaatggatggttattggtaggttcctatttctgtctccattgactgctttattcattcttttctttctttcttttttttttttttgtttgagacagtgtctcactccatcacccaggctgtagtacagtggcctagtcacagctcactgcagcctcgaacttctggtctcaagagatcctcccatttcagcctcctgagtagcttggactcgaggcgcatgacaccatgcctgggtaatttttttatttttagtagagacaaggtcacgctatgttgcccaggttggtctcgaactcctggtctcaagcagtcctcccacctcggcctcccaaagtgtatttactcattcttgaaacatttaccgagtatttagcacatagctagaaataggaagatgtatctcctgttctcaaaggaatttgcaatctggtggggtaaagaagggcatgtgggtacaggagagttttggataatggagtcagggttgactagctgttcagacaggtctcggggtggtttataaggtcaccatggtacaggatcagacctcaggtttgcaagtccaaagatgggatttggtcacccagagtgtttcaggctcaggggaactgacttgttgcaggcaaccccacaagagcacaaaccagaatgtcattttattaatatgcattgagaactagaattcacaagcagatcagaatactacaccggctgtgcattttctcccagtaggaaagtctaaatgggaagcatattataaacaagtggctcagtgaggctgtactcagagcaagggcaatgaattagaagaccttagcagctggtggtatcaaacattgacggccccattggtgccaagcctggtagtcctcccctcccccatgggtccagcctaatgggttccaacctttcttttattattattttttatttattttttgagacaggctctcattctgtcacccagtctggagtgcagtggcgtggtcttggctcactgtgacctccgcctcctgagttcaagcgattctcgtgcctcagcctcccaagtagctgagactacaggcgtgcgccatcacgctgcctgatttttgtatttttggtagagatggggtttcaccatgttggctaggctggtcttgaactcctgatctcaagtgatctgcctgcctcggccccctcaaagtgctgggattacaggtgtgagccaccatgcccagctccaacctttctctgaaatagtgatagagacactgacagaattcctccagccatggaagcctggttctttctgttggcctattcttatcccagatgtggacttttagtgttgtttaattcaagatcagtaagaattctaggcagtttttcctttgacttaagtttttagttctaggacttaatggatatatttatttatttatttattggcaaagagttaatctcattcattatatcttaattttgtgctttgaacttcccaagggcaagtttatctccatgtttctcttcattttgtactgaatatgacttgtgctcatcctttacagtttagcttaagttaattttagctttccctcagtgtaccttttcttgatgtcctcttctctaccttactgaatttagactccctaacttttttctctcatatcatcctgtgcttctgtgctcttttctctatactcttctgtacttatcacactctaataattatttcctcatcgtcctctttcatcagactgtaagctttaaaagaatagcaactatattttattaaactttgtgtctccagctgctagctcagtgtccggaagaaagtagggacccagtaaggtgtggatagatggatagatgaatgggtaaagtaacatttatgctgagtccttaaatgatcagtagaatgtttttcctaagacactacaaactactctcaagatccaacaggcatttactgtatcttacttgacctctttcgtggcattgacttgagtggaagggtgactgtggaaatgagattgcagcatagtgtatctcctcacttctgtcttaactctgtagtgtagctagtatttgaaatccattttcatgaaaatgccagtattcttcagtactgtaacttggagatgttcctagtgtcttacaatcttgttttggttttctgtttttgagtaacaaaccatcccacagcttcgtaacttaagacaataatttattattttttgcaattctaaaatctggtcaaggctcagctgggtggttcttctgttttacactgtctgtaggaactggaatgtccaagatggttcttcactcacattgtagtatctcgcctgcaatggccgagaccagctgggagatggtggggcatcttgtatatatcctctttatggctaccttgtacttcctgtcaccatggtggtctcaagatggtagaacttatatggtgactggcttccaagaaggaggtaacagaagctcccagtttttctaaaggctagatttgggcctggtgcaatggctcatgcctataatcccagcactttgggaggctgaggtgggaggattgcttgagcccaggagttcaagaccagcctggacaaaatggtgagaccccccgcccccatctctccaaaaattcaaaaattagccaggcatggtggctcatgcctgtggtcccagctacttgggaggctgaagtgggaggatcacttgagcccagaacggcaaggttgcactgagctgtgattgccccactgcactccatcctgggtgactgagtgagatactgtttcaaacaacaacaacaacaacaacaacaacaacaacaacaacaacaacaacagaggctaggtttataactgatcatcattccttctatctcattttgttggtgaaagccagcccagattcagggagaggggagacaggctgtgccttttggtgtacagagcactatgcatagacgaggaaggatagcagccatctttggagattatctgaaagagatcaaatagtgtgtagttcaagacatgcacgaagaaatagcagttatgctacactacgtatgtactaaagaagcacacctagtttagtttaattggatgaagtctctgggggagaaaaagggctctgtctggtcagaaaactattctttgttaacatcaaggttaggaattgatgagtaatggttaatgtgtaaacctcttttaaaaatgagaaacatcatgctatcttatctgttaaaactcaggtttctctcctcctgtggaacatacatgaaggaaaaaaaaattcaggattctgtttaataatttaaagttactttttttttttccaagtgagaacataatgggactttgatataagagaataaaaaagatctatttccttttatttttctcaccttagaggggtgtttggaaaagtgtcccataattaaagtttcttgagttggttattctactgggaaatttttgtcataaagtttttcttcttaatgttaggatgaagaatggcctagaagtgaccctaatagtcctatttcttgatgtgagctatttcatgaatgttttaaaagtatgataattagtttcaaaaatcttgaaagacccagataaatcagatcataacacagttagtgggaacatagaatgtatactttttgaggtagcacccgtccttcacaacagttgtgacagtctatatatatacagtatattgctttgtagctttttgtacagattgcgcctgtcttccatgcttatggtcactcatctctgtggcatttcacaagaacagatgtgtaataaaggtcactgtttctttgtaatacttacaaagaagtcaggacctaggaggctgaaggaataaataatttacctgccaaggactttggtgaagaacagaattcatttcttccactcctttagaatggggagccttattctaaaaataggctttaagattactttcaaagatagacacagtgcaagaaaagaataaatataggtgaagcagacacaacagagagagaaaatacaggcaggaaataaattgtacacaaaacacatgccctgaagttctccacctaggctggagggataagggagcagaggtttgacccaaagccacctctaaccaaaggaagaaaggaaactgccaggaccaatgctgtgagatcccagtgtagtcatttgccatgaagagctaacagggtagattctctcagcaaaatgtttgcttgtatgctgctttaatgactatgatctgtttttttgtttgtttgtttgtttgtttgtttgttgttgttttttgagatggagtcttgctctgttgcccaggctggaatgcagtggcaccatcttggcttactgcaacctccgcctcccgggttcaagtgattctcctccatcagcctcccgagtagctgggattataggcatgcgccatcacactcagctgatatttttgtatttttaatagagacggggtttcaccatgttggccaggctggtctggaactcctgacctcaagttatccacccacctcagcctcccaaagtattgggattacaggcgtcagtcaccgcgcccagtcgactatgatctgttaatagtacctaagggttacagtccataggagaaaaaaactagaatatttctttctgaaacctgaagcccaggccgggcatggtggctcacgcctgtaatctcagcactttgggaggttgagatgggagattgtttgagcccaggagtttgagaccagcctgggcaacatggtgaaaccccatctctatttaaagaataaggctgggtgtggtggctcacacctgtaatcctagtgctttgggagtgtgaggcaggtggattgcttgagttcaggagtttgagaccagcctgggcaacatggtgaaaccccatctgtactaaaaatacaaaaattaggcgggtgtggtggcgcccgcctgtagtcccagctactcaggaggctgaagcatgacaatcacttgaacttgggaggcagaggttgcagtgagccgagatcatgccactgcactccagcctgggtgacagagagagactccgtctcaaaaaaattaaaaaattaggctgggcgcagtggctcacgcctgtaatcccagcactttgggaggccgaggtgggcagatcacgaggtcaggagattgagaccatcctggctaacacggtgaaaccccgtctctactaaaaatacaaaaaattagttgggcatggtggcaggcgcctgtagtcccagctgctcgggaggctgaggcagaagaatggcgtgaacccgggaggcggagctggcagtgagctgagattgcgccactgcactccagactgggcgacagagcgagacctgtctcaaaaaataaaataaaataaaataaataaaaaaattaaaaagaaaaagaaaaggaaaccttaagcctagttattgaggtagacaggatgctacccctgccctgtcattttatttaaaagaagcatttaagcctaatgaacacgagcagttctaatgtccgttggaggggaggtagcattcacagttcatagattcatttagcaattactgattgagcatcttctgtgtgtctagttatctatgctcttaggcgctggggatgtggcagtgaacaagaacagatgtaaatgacaagagatggatggtggtgatggttgcacaattgtgtgaatgtacttaatgccactgaactgtatacttaaaaatgttcaaaatggctgggcatggtggctcacgcctgtaatcccagcactttgggaggccgaggcgggtggatcacctgagattaggagttcgagaccagcctgatcaacatggagaaaccccgtctctactaaaaatacaaaattaaccgagcgtggtggcgcatgcctgtaatcccagctactcgggaggctgagacaggagaatcgcttgaacccgggtggcggaggttgcagtgagccgagatcccgccattgcactccagcctgggcaacagagcaagactccatctcaaaaaaaaaagtttcaaatggtaaatttatgcatattttaccagaataaaaaaaggcagttaagacaagtaagatgctgtgtcatggggctagatcaagcacttaggggtggggtgttagggactttgaacggggcctctaccctgcgggaagggctgagctggagggatctgtgggcccctgatcaagaaagaagcaggagctgtaacccagcctggctttggaacttgaggctgcccagtggaatctgttgtgtgtgacggaaggaggcagctgcactggatgggagaaactggagggactctgtggctgccagggccagctgcagggcacacagctgcactctgaggctggcacctgcctccttcacttacccaaggcttttcctcctgtttttgtttccagacggccatcctgagacgacagggtcgatacatatgctcaacagtgcctgcgaaggcggaagaggaagcacagagcttgtttgttacagaggtaaggctctttcctgcattaatttacattttgaagtcattttcccctaactgcctccttttctttaaatttcaaaattgtcaaggaagtgtcaaaagggtaattgtatttctatgatggaagttcaaatagaataatgtgaatttttcagactctgaaacttggacagaaatgtccacaggggctatttcttttttacatttttattatttttaaaactttatttatttggagggggctatatctgactacaaaaagtgaattccacagaatttatctcatggacttaaaataagcagtaacttgtaaatgaattcactggaaatctgtgggaggtcttgttattgatactgtttttaagggtgacacacacatttatgtatcatttatttcatttatacatttatatttgcaagttatttttgactagtattcatgaagtactagctgataataagcagggtctatcgctagtcaatatatattattatatatattgattactatatatattcctaatcaagatacattgattaatattatttttgtttgaaaatgcaaataaaattatcttatggaagaaagataaattatttacttttttatttttatttttattttttgagacagagtcttgctctgttgtctaagctagagtgctgtggagcaatcttggctcactgcaacctctgcctctcctgggttcaagtggttctcctgcctcagcctcccaagtagctgggattacaggcgtgcaccaccacgcctggctaacctttgtatttttagtagggacagggtttcagcctgttagtcaggctggtctcagactcctgacctcaagtgatctgcccgccttggcctcccaaagtgctaggattactggcatgagccactgtgcctggccagaaagagaaattattacaatttaggttgtttgctttagtttttccccttggagtgtttgttttttcctccaggtaattttaggtaggaaggaataattagatgttttaattttgtttctttaagtgcaccttcatttaaaaataatgatttttttttaatcctggtttttctagttgatatttagatcataaatatgctcatcaataaaattgcttactataaggaagctataaatactcttataaagaccaattaaataacaatatttaatttccattgagatttttgaaaaattaaatataaaattaaaaaatttttaagtgtgttccctcatctttctgaagaagtaacttcctgtcttacctcctttgccactatattagtaaacttaattccagacaaatacagccagatatgtttgtgaatgtagttataaatgtctttttaaggcaggtagtggcaaactatgacctgcaagcaaaatccagcctgtagccaatttttgtaaataaagttttattgtaaagcagccaagcacatttgtttacatattgcctatggctactgtcaccatgcaactcaaagttaagtagagataatatgaccctcaaagctgaaaatatttatgatcttgccttttacacaaaaagtttgttgacctatgttttaaagcatgtggcaaaattattaattgctaactcagttctcccagttgattaaaaaaatatggttttttgagggagaactctccattaagttatttaatcactgcaggttgagcaatagctgcttcatcctatgctgctggagccaacataactaaacacttttgggacccttccacttgggtggagtgaacatcacttcctcttcatcctctgatccagggaatgacctaatggcttaaaacaaagcaaaacaaagcagaaaaaaacttcaaaaacctttcagtgtaacttcaaaatattattgaatttcaccagtttgaaatgttaatcgtataatcagtcagtcacattcctgtctttttgaaggtacagttctcaggatctggctttctgatggaactccttatctcctagactttctgcatccccagaggggtgggggttgcttgcctaattctgtgcttctgctttggaatttagccaatgcctgctatgtagatggtcaacactggcttgttaaatcaatgaatctctaaatacttagccaggttcactgtggagtttttttttgtttttttttttttttgtatgtgcgattccttataattataaatatatgaacataataaactgtaattattttccccattttgcctaaggtattaaaatcttggccaggcgcagtggctcacgcctgtaatcccagtactttgggaggccgaggcgggtggatcacgaggtcaggagttcgagaccagcctgaccaacattgtgaaaccctgtctctactaaaaatacaaaaagtagccaggcgtcgtggtgttcgcctgtaatcccagctactcgggaggctgaggtaggagaatcgcttgaacccgggaggcagaggttgcagtgagccaagattgcaccactgcactccagcctgggtaacagagcaagattccgtcttaaaaaaaaataaataaataaataaaaatctgggctccattcataaatgcatttataatatacaaatttatgctggtttatttagtttttaattgggcaggtacattttatacttcagaatagttttaatgtcctgcaggagacttggtggtacaatttcagttctagagcttgttgaaaaaccgctgtagctctttgaagagaataggatcacacccacaagaccacgtcgtacatagtcaggcctgactacttagctgtgccagtggacctaggggcagtagtgggaaaatccaaaactatggattattctgaaatctgactggttttggaatgaaattttgagtgtgaatgtatgatactcaaaatgtgaaaatgctttgagaaatctaaaaaaatcattttcaaggataaaatagcattttaaaatattcttaactacagagtaaaaaaatcaaaaagtttgccagctccaaaatctgactttgcgcttagcccttctctgccatttattccacctctcagaataattttaaaaacttacattaccttcacatcacacatcacacccttgccagtaaagtgcttattgtagagcctggcacaaaataagcacttgctgctgttgtaattcttactttcatgagtttggaggtggaggggagtttgcttcagaagaccttcaggcatggcctgtgacacagatagaaaggttgacagtagaaacgatgaagtgaaagaagcagaatagagacgttgttcatgttagttacagccagagccaaataaactagataaggcataaatacatttatcgacctatgttttcattgattcactcatgctttttttccacccacactgaagtctgcacataaatagtcaagtgctgactggacagaagatcatttgaactaagctgattttaactaaaattctttagcttttgattttgactcattcatatttgaagatctggtggatgtggcattataatcttaggctttatgcactattggaggatcttcatgggtggatgaacgacggacaccaggctggcccattgaatctgtcatgtggcgaggtagtttgaatgcagtctgtgtaggtgaggtcactaatagaatccttggcagtggaagactacattaaacattctgtacacacacacagatgaaaatgtcatggtgctaatattaattggaatgcatatgtttcttcctaattatttcactcttttccttatgaatggaaagaaaaactgagggcagatttatatggtaatattaactaacagagctagctagttctaatattagtaaataccatgaaggcgtctttaagttcacgcatcctattcacttttatgtcatagtagaggccacatggctttttaagaaccaggtgcttactctgaaatagtccattgttaagtaaatgtcacaaggttaggtgaagttgtctccttgtaaaacctgctctcagatcattaatgatgataacttaaagtgatactacccccaagggtaatgtttcagtggttcaaagtctcaagcttcacaggaatctctggtggtggaatttcaggcattagctcgttgatgggaaaaaatttttttgatgtttctatgggtatgccttcacaaactttcccaagtgttttccaaaaatcacgtctttctgttttttattttctatttttaaaatcccccttcaatagtgcatcaaaacctataactctgactggcatcttgtgaactataaatatgaagattactcaggagagtttcgacagcttccgaagtgagtaagctatattatacacatagggaaaagtctttgtacttgaaatgcttggggggaggtatgtaacttcatatgcaatcagagtaattgaggaaaatatttttagatggtttatgtgtatgtggtgtaactattgtttacagggcctttgattgtaagactcaaacatgctactttggtattgataggtagtaataaacatgtggatggtttaattatgtccagtggttcttttcagggtaccactgataaataaataggtgaaattttttcactacaaaatataaaacaaacaaaacgtaagtgtactgaaatatgctgcagtgcattttttccttgaaaagaatattttgaagaagataattataaagagcattttacattgaataaattttatgtttttaaaaaaagtaaatcaagaaacaagcattttcccagttaaattttttttttatctcctttaatgtattaacttattctagactataccaaaagcaagtgtatttagattgaatagttgtggccaaagtgaatcgcggtagctaggtattgccttgacagactatcttttataaaaggttccattgtgtgttgctttaaaggaatacctgagactgggtaatttctaaagaaaagagatttatttatttatttttatttatttagttttgagacagagtcttgctctgtcacccaggctggaatacaatgacacgatctctgctcactgcaacctccacctcccaagttcaagcaactctcccgcctcagcctcccgagttgctgggattacagccacttgccaccacgcccggctaattttgtatttttagtagagacagggtttcaccgtgttggccaggctggtctcgaactcctgaactcaggtgatccacctgcctctgcctcccaaagtgctgggattacaagcattagccaccgagactagccaagaaaagagatttatttcgcttatagttctgcaggttgtacaagaagcatagcactggcttctgctcagcttctgttgaagacttttgtgctgcttcaaaacatgatggaaaaggtcaaagggaaagttggcacttgtgaaaagagaccaaagaggaggaggaaactcactttataacaacccattctcttgggtactaatccatttcagcaacaagtaatcccatcttgccaggaacaagaattcactcattactgtgagaacagcaccaagcctctcatgatggatctgccccataacccactaggcccaattatgcaacaacggggaccaaatttcaatctgagttttggtgggaataaaaaccatatccaaaccatagcagttggcaaattgaattatacttgattttgggaaaattgaaagcaaatagtgatggattatgttttaaaactaaccatcaccaatgaaaatattacttgagacctgattaatgtatttttctttgcgtttgttacatctttgagctggaaccttttatgcggttctcagtagacctagctgtttgtttttcctccttgtgtggctttgccactccttaagaatgttcggccaattccccgattgcctctttttaaacctcagccaggaacactccctcctagtattatcttctccagatgggtagccctttagttctatatttacccaatcctcccttagggattttttaattcttcccattggattggcttaacccatctttgttgatcctcttgttcatagtctcagggttgaaagatatcagactatgtcatgtcgtatacttactatctaatagactgctggtacattttctctcttggcattaatgagaatttccaaatgtgtgatgagaaagagagggagaattgtaacagtggtgaagaacacagattctgtgttctgcctcagacgactctgccgtctgtcagcctgattttcctcatctgttaaatggccttaacaacagtcaccatgattaaaggattaaatgagagggcacatgagaagtgcgcagggcctagcacgtcatacccattgagtaaatgtaagctgcttattggtattggtgtcttgtttttgttgtggttaataccatcattgttaatcggtttcaacgcaacaactcaatcttcctttttttcctcataaactttgtattaaaagttattctaccaagtctttgtttattaaaaactaatccactttcttatttttagtatgcctgctaactccccagaagctatgctgtcttttccacatagctttttggagctttcttactcaagtctcttggcttacccaccttgaaaagcaagggcatagatggttttattctttgtctgaataaagaagctgggccatctttggatttagtaaaggccgggccctatgatggaggaagaaatgcaaagcctcttccttgactaggcatttctaaaacaaattttctttgttgtttttatagcaaagtggtcaagttggataaacttccagttcatgtctatgaagttgacgaggaggtcgacaaagatgaggtgggatacctgcttgctgttgcttctcttttcactctagatttaaacatcaattttacagacttagaagattagttagaaaattaccgacatttagccaaaacaggcattggagtgttacatgaaacgggaataattttttaaaaatgttattgattgattggaataaggtctctgtttcaactttactgcttagcatttcatgttctcttggttgtgtttatttgttctgagatcattttcaaagacttggatcagatctggctacattgttaaaagatatcaagatgacttagaccttgaatttaggttgtttttcaacagatctcgaaacagctgccagccagtagatttaaatggctatttcttcaatgattgcttttagtgaagtctgatttgatcaagcccactccccctattcctagaggaaagctcatggctaaagaactatataaagggagtagggcattgagatgagtctgcccactgagtgagggaaacctcacaagaagacaatgcccatctctgcatttctcatcctccccattgattgttaagtgtcccattgtgagtttaggtttttccttctttaaaaaaattgtcagctgagctataacattagccactcattaagcaatgtgcatgtagcaaattatttttattccccccatcactttatctctcctttctgtattgcctcaatttcctcccttgctttattcacctttccctgaactaagcctctgggaaggtttccaggaatgtgcatgtgcttttgtcctctgactataggggagtgtcatttgaaaacattttttcgtgaaaccaggcaagaccttccaacgtgagtggtcagttgaggtatgtcctttttggtccttttgtggctcattaaacactgacaaataaaaatttggacaggagctagctttgcctttaatggaataaagttttcagaaatgtaggcgggtctctctctttcaccgctaagtggacttttatgtgacttgtaggcattggtgtcaatgggtgcttcagtaaaggggcaatggacaacttggcacaaagggaatgaccttcccattgaccaaactcacagcaagcaacccaggtaataacgggaggttgactgctggtgttttccttctctcctaggatgctgcctcccttggttcccagaagggtgggatcaccaagcatggctggctgtacaaaggcaacatgaacagtgccatcagcgtgaccatgagggtgaggacgcacatcactttgccctcccctctcacaagccctttctgccatagagctcgagaacaatgctcaagatgaatgcgcatgctgttcttccccacaaaagggacattgtctgattcctaggatgctcccctggtgatagcacccccattggcacagcctcatccacccactttccctcactgtcttctgaccaccagcataaggagaccatccctgggctggtgtgaaggtgcagacactgacataggctttcttctctgtaataactgaaaagtgctctttggtacctcacagaatgtcaccaaggggctatctgtcatgccaatcctgagcacttctgtggaggtgtactgcagcaaagtcaagtaaagcaaaaattgaggacgagaaaagaaaatagttgcatagaagagaaggttgcagacagagaagtcaaaccaatagaagaagctattcaggagaaaagtgggaccagaggaacatcaggattaataacaaagggaagagaaacaagggagtcagggagataaaaattaaggaggaaatgtgactgtcattaccctaaggctggaaaatcattcagcgtcatgaggcaaaaaatagttcccattctgtgagcaagaaaccctggggattttagagaaagtttctgtccttctgtgctgcatcccaaattggaagtccctgcactgcttttgggtagttatgtaaaatctctgattccgtgggtgagaaaaatgacccatggatattaggggaaccacctcctcagaactgagatgcagtgagcttcttagatgggatggggagtcttgaccccacagtgacctggagcatcagctagagtgagaacggaaacaggttttatgtatgtatgtagtcataagtgggttattgatagagattgtgaccctcttcattttgaaagaatagctgtgtgtatatttttctctcagtcatttaagagacgatttttccacctgattcaacttggcgatggatcctataatttgaatttttataaagatgaaaagatctccaaagaaccaaaaggatcaatatttctggattcctgtatgggtgtcgttcaggtaaatatgaaaagagttttaccattatgttttcttatctgcagtagtgcttatgtgtaaattagcagatttaagcaaacacttccaaaaatggcaatatgcatggtagaaatataacatataactttaaatgaggcaagccttgtttttcatcattgtagaagatggaagggataatgtagaggcagaattatgctgtggcaggcaggagcactctggctcggccactttatagctgcgtgacctttaacaggctacttaattcagataatgagaatgtttctttaatacggcaaatgagtacattggatgaatcagtgcaggaaaatatttaaaacacttcatagtatctcagtggtgatttttatcgctagcattgtagtaccagtggcggtgtagatcagtaaagagattaggtttcagcgcagattgagttcaaatccctgctcctccacttaccaactgtgtaaccttggagatgttatttaacctctctgtacctcagtttcttcatttgttaaataaggataatggcagtaccaaatatggttactgagagggttcattcattacacatgtaaaaagcttagaacagtgccaacaaatggtaagcatttggtcagtattagatagttttgttatcatagggctgttgtacttttatatcatagggcttatgtacttatcctttaaaattattgttaattaaagataacacatgaatgtatttttcttgtaaaaaatcagacaatacagataaagtgaaagtccttctggactcctcccctccttcagtgtctcttttctgaggggagctactaccagttttgcatgcatccttctgtagctttttagcattgtctttggaagagagttgtcaatttccctgtccatcatctgtccatccatccatccatccatccatctgtccacccctccattcatccagccttgccactttcaaggaagatttaaggcagcagcttataagcatacacaggacatgggatagcataaatttaaagtgggggtgaaagcagaaagatgaacaggggattgggataagggtgagagaaaatagagttaaggagaaagcgtatgttttgaagatctaacacctgctgtgggtgggccaccacctgggctctatgctttctcacttggagacctgtttagtcacgcaattcacagtgcacatgagataaaggcaatccaattagtcagaagctgcccaagcaatctcagaatgaagatcattcaggcatttttctcagggttcccctcacacagaaggctctgtggttgatgaacaatcttcctaacaacccctcacaaaagattcagtcaccattatcaaagaattctcccttcagataactccatgatggctgatcacatcagcctgtagctcgattctgtaaggagactgtttggtggggccagtgtgacacagctctctggtttgactaaaggtatacttgttacatatttacatgtttacctagaattaaagtgcattttcttccaaggaatacatttgtctgattgaaacagcccagccctgcagtggctcacgcctgtaatctcaacgctttgggaggcagaggcggatggtcaggagttcaagaccagcctgaccaacatggtgaaaccccgtctctactaaaaatacaaaaattagccaggcgtggtggtgggtgcgtgtaatcccagctacttgggaagctgaggcaggagaatcacttgaacctgggaggcggaggttgcagtgagctgagattgcgccattgcactctagcctgggtgacagagcgagactccatctcaaaaaaaaaaagagaaacagcccagcagtgctgaagggcagtgcttcacccctgcatcaccttacccactcacatcctattcccttgaaatagtagtggtgctagatcacaagtgttcactgctgtttcttcattcatcagttttggacgtcattgcatgatttcctgtgctggtagatcggattttagctcctggcaccctcctttggcctctagtctggatgaattgctttcctgccccacacacctgccatgtagacattcggcctgtcttccttcctgtgttgggtttcctgtttctgggaccttatgccttcctctttcttgttctactttcttgttttgggggagcacatcttctgcagctttctgaggaattgtgtgtgagatgttaattttttgagaattagggtatctgttcatatcttaatttttgcattcatgcttgactcatagtttggctagttataaaattcaaagtgaaatcattttaccttggaatttcaagggcatcccattgccatctagtttccactgtcgtttggaaggttctgatgttattcgaaatccctgttctttgtggtcttctctttagtgttctaaaattttggttgttgtgtcttgatttttattttatgctttggtaagcttttttgttaagttataacatataaatagaaaataaggtataacatataaatagaaaatatatgcctaatgcatgtgtgactcggtggatctttctggagctcggctctttcttatctttgtgctgttttatttcccgtcattctggagactctgccctgcatattctggccaccttggtcttccccaggtctcgtcagtgtcttctactcagcaagatggcagggctctttttggattccccttcctgtgctgcaattcagatactgcctccaggcagaaagctgaggcaatttggggctcacttcagtctttcccttctacagagaaagggctgcactgccttttgtcccctatctgaaaacagttatttcatgtattttgtccacttttctagcaatgatggtgggaggctaagtccagatcctgtttcttccttatggtcagcagtggaagggaggggtccagaatcagatgtctgcagggaccaaggaggtcaattaagtgacagagaggcctggttgcaaagcaatagggaatgccggggtgacctggagcccagtgccccatttaaagggggcatctcctgcccacctgcagctggtgccgccaggtggaacccccggctcaaaggtgccagatcatctggtttctcaaaaagcaagaaatacagaatttgagttaaactttggtaactttagttattggtaactaactttaaaaaccactttgaaaaataaataaaaaacaccaacaggtaatttgagaggatacaaaaagcaaacaaacaaaataccactgtgcagtacccccgccctgccgaaaaaaaaaaaaagaaaaaaaaaggtaaaatacatgaaagtatatttgggcccacgttcaagactgtagcaccacttaatgctcactgaaaattgttttcagtcaacagctaatgtggatgtctcttagctggcaattcagccttctctgaaggccaccactatgaacaatctaattatatcagagtatgttcattgacaatgtctgtgaagtaaggagtgccagagtgatttatcagtgacagtgaattgacttcttgggtgggattcccaagtaggagttttatttgtattctttagtcaaaagacctttaagttactttttagctgaattttctggcactgactttaaaaagaaggttaaagcaaaactaaatgtatttggcaacctcattttttaaagtaggaagtaattatttttgttttataagagagttttgctgcctgtttctggcccagggacagatgtttataagtacaactgccctgagctatcaattagtctccggggtgcatttcaaaatctaaggttctgacttcaatggaagtctcttccttcaaattgtctttgcagatgcagctgatggtgttttcatttaataaagtgtatccaaggcttcaaaagagtaaaataatttgtttttatctgtgtctgtttgtaaactaagcatcaaaagttgtgatttaagtgtttttaaaaattattacttatggatattataaaaaaattagttgactggtgctgtgaattaaaaaaagtgcctaaactaaaaaattttgaagcattttagaacccttgaaatttattatacttattttgcagatgagaaaactgaggctcagaaacagaaatttagaattgaggcctaatgtttttttctccacttttaactttctcttttcatgattgtgagtatgcagggaaaggaggagagaaaattcattttgtttcaagcctttgacttcttccctggttcttgccttgaagtttaagtggaatccaaagtggcaattactgagcccacagcagacagtctgtgcacaagagtgtgtggctttgccaaggggagcacttgactttgcatttctaagaactgtgctgcagaatcacagagacttttgggagggttgccctgtccctgagacctccaccaaggaactcttagagagagtgtggataacccagtaggattttagtggctatgcggggggctgtcctgctggctcaggttagtgggagtgtttgatttcatatcgctcagcctgtccttacaggggatcttgtgccatgatcctcagagctgaacctctgtctactgcggccaacctggggagattttgctccctggaggacatcttggaatgtctgaagactggcatctattggcttaaggccataaatttcgctaaacattgtacaatgcatggaccagccactcacaacaaagaattggctgcccaagtgtcagtagtaccgagattgagaaatcctggcctagtgcatgttcatcttccgtctgttactgcacatggactactgttcttgttctgtgagccagtcaccctcttgcaggcatgaaaactggaggcatgaggcaaggccacggacagggagtccaaataccttttgggattcataaaggatgggaaagttccagataagtaagccaaacatagtaatagataatggttggcttttaaaaatgtaataccatacactacttcattaaaaaaataggagctgaagaaatatgaaaattttacatgaaatttcatttattcaacaaatatttttcaaatacccactatgtgcaagtcactgtagagtccatagagactaaggatgtgtagcactgacaaaaatgggagcactgaggaggtttcattccactgcagggacacacagtgaatcagatgagtatgtaaagcaggtaatgagtcagaaggaaaaataaagcttgcagaaagtgaagcagggaaggtggacggtaatgggatttcatgggggggggctttcatgaggagggggcaagctatttaaaatagcttggttctaaatgccaatgagatatcactcaccaacaagagagagtaattattttaaagcagttctaattcttttaaagtatgtctgtttatccttttttcatttcagaacaacaaagtcaggcgttttgcttttgagctcaagatgcaggacaaaagtagttatctcttggcagcagacagtgaagtggaaatggaagaatggatcacaattctaaataagatcctccagctcaactttgaagctgcaatgcaagaaaagcgaaatggcgactctcacgaaggtagataggcttggcttcccccaggcacatacacactctgtgggtgtctttatttttgccaggtgggtataagaaggagacctgtgttacacaagtacatgagaggtgggacggataggagctctttacaaatatcctgtcagcaaaggttttgtcacattataacttacttccctgacatttcgtatatggaaatcatgtaatgggaagaaccaaagctttggaggcagaaagggagacctgggtttgagtgccataaatactgtatttcagctgtgtagccctgggtaaacaacttatgttttctgagcctcagttgactcacctataaaatgggaataaacatgaaaattgctgggaagatgggaagtgtaaataagaaaatgaatctcaagtatctggcatagaattttactgtattataaaatattagtaataattagaatgcatgggagcctcagattaaattggtgagaaaaatctggctatgttcttgacaattcatgttttacttcaacccttaggtgattcccaaccctggcttccccttagaagtacctgggagctttttaaaaataccatttacctggtcccacaaaagattctgatttagttggtctggggtggagcctgggcaggtctgacttttagggggtctcatggacgtgtccatgtgggctgttgttcatagctagtgtcagttctaattggacggtgtccatgctataccagctgctcagtgttttgactttcatcactgagcctgtggatcagtattttttcaaagcaccccaagtgtttcccaggagcatccagagtggggaaccactgtgttcatttgaaggcacctaagagaaacggccttcctcctcctgtttcaaatgaaatgctatgaattacaagtgattccgataatctgttttgccattttagatgatgaacaaagcaaattggaaggttctggttccggtttagatagctacctgccggaacttgccaaggtaacatcgtcttatatcttctgctcttcgttgaatgctgttgaagtatgtctcatttcactggtttgtccagaatggaatctgttgaaatcataaaaattacattgtgattacctctctctttttctgacctgattacgaggtgacgtgtactcatgcagtatgatttcaggtctgtcttctaaaaagtaccctacaaagcattctccttttattattattttaagtgtttttttccctgataatgcttaacactgcatcacaggtactgaagaaataactgaaatatgcaggcagatgttctcataatagcatcgtactttctatgttgatacatgtgctctcccttactcagggtaatagacacggttccaaagaggaaggacctggtaatcttgccacgaaacccgggggttgcctgagttacagaaattgtttcgggtcactcttactggaaaaaaaataagctattcctgtgtcttacaattttgagaaatttaaaagttactgaaaagcacaaagaaaagcaaatcaaccatactgctacttcccagattaaatatctattatgatgttgcctttttagcttccatattcttaaaagatataaaacatcggttatagttgaagttctttttaaacactgtccttattcccattctcttcttctcccacaaccccaatcagaaacaagcactattaaaagttttactttcatttttatatctttacaaataaatctatcataatgatatatacagtatgatttagtatgtttaaaaatgttttataaatgctaacataccatatgtattctgcactttaaaaaatttttaaatttaccccttttatttgtactatatagactttttattttagctgttctattattttcatttttttctattataaacaaagctacaatgactgtccttgtacttgtgtccttgtgtgtatctgaatgattctttcttaaatgagagaaatatctttgtcttctctagccctttgcactcttactctgttactgcccttctattcttttttgatactagagtgaaatggcgaccctccacacccacatcttaaacactataatagaaacatggtttatctatataggattataaatagaccagcattcagcattgacctttattttaagacaacatggctgttctcaagtgtaaaatctccctccctggctagggctttagagcattgtttttctttaggacttgactgctaccacagtatctttttagcacctgcctattaaagctaattttagtgccaccattgtaaaccacctcctagtctgggaagagttttggcttgtgtgtttgtgttatgaatgtctgtgtatcatattttgcattgagatttgcttttttgtttctggatgtttgggggttcataatttctcaaaacaaaatatttgtgcccatttgggttttagtttgttgcagcaggtaatatatgtgatgccatctagaattcagaaagtaaccttctgcacttactgggtgaacggaatggatacctaggagaagattcatgttatttgagcctaatgttgattaattaaaaatctatgctttttcctatgaggatatacaggaacggtcccctccttctcttactacccagccaatataattcagtattgtttgatcccaagacctagggagattttttaagatatacatatatttaatataaatgtatacatttatgtatatatacttttttataagtataattgtatattttgtcatttaaaatatttggaactatttttaaactatgggttacaagttaggttaagccattttagttggtgaaatcagtttgatttcaacccctgcttctttttgttttgtttctatttagttttttattctttttattgaggtataatttgcaatagcagaatgctcaaacatgaattgtagagctcactggagttcgcatttgtacactgatataagcagccctcaggctagcttgtacctgagaccctctttattttgacctccatcaccgtagattagttttgacttttctagaccttcctgtgaatggacttatacatgtactctttgtgtcaggcttatttagctaaacatgtgattcactttaagaagttttttttaggtcgggcatagtggctcatgcctgtaatcccagcactttgggaggctgaggtgagcggatcttttgaggttaggagttcaagaccagccttgccaacatggtataaaaccctgtctctactagaaatacaaaaattagctaggcgtggtggcaggtgcctgtaatcccagctacttgggaggctgaggcaggagaatcatttgaacctggaaggcagagattgcagtgagctgagatcatgccactgcactctagcctgggtgacagagcaagactgtgtctcaaaaaaaaaaaaagtgtttttttaatgtaatagaattgaatggagaatatgaaagtacactgcccttaataatgacattattttttatataaaatactgtcattattattttggtggcacctgccaccatgcctagctaatttttgtatttctagtagagacagggttttataccatgttggcgaggctggtcttgaactcctaacctcaaaagatccacccacctcagcctcccaaagtgctgagattacaggcatgagccactacgcccgacctgaaaaaaaactttttaaagtgaattacataattttttacataaaataatgtcattattaagggcaatgtactatttatacatatagtgtgtatgtgtgtcttgcatagtgatataaaagatatttgtttttcttagtgtgctattatgtatatttatttactttcattggtatataatgtacctattttgggagttcatgtgatactttgatatctgtatacaatgtgtgatgatcaaatcaggataattgggatagccatcacctcaaacatttatctttgtgttgggaatttgaaacatttcttaccaggagtcatggtcaaaacctgaaaaatgaatccttgttagaggcttttactctttccccctggctttcaggtgttttacaaatacttttatttaggaaggtagaaaggtggaaagtaattttttgaaggggaaaagaatgaagaaaatggagatgagttattcactcagcacatgggtatctgtgggctttgccttttaaagcccagcttggtgtcagtgtgagcagcccaggcagtaaggggagacctgtgttccccatccccagccttgagcaaaaatgcagttttggctgtttatcatcccccttcagggtgtctgaactatttgcaccggttgagaaggcaaagaagttgacctgataactgttggtcatcccattaggaaggatggattccatggttacagaatcagagactgaagtatgcagagggaggggtggggagagagaactgtgcaaggagtttacccagggtatgaagaggtaaagaggtcagtatcagggaaggaaggtgcaagaaagggtcaggctgggaggctgggccacagttcagtaagattacaaagaagggcctagaacaatgagggcaggcagaaggtggctgaaggtgtaatttcatggcaggttccttttctaatcagctcctctaacctccttcatcctgttgccccggcttttgttttccactgtgactaagacatagccaaacaggatatgaccgacaggaagttgtttcagtgcaaaaataactgatgtctcattctggaatattatggaagggctcattacttacagtgtgagtgatgtaaacccaggttttcagaatattttgtataatcttggagcttatgtttgtacatttagtactgaacatctgtattgttttcttattagagaacacactgtatttaccctaaaactggttcttttcctcctattgtctattatggaaccaaacaatttttattgtaaatgtaacagtgtgtagcatcagtcttataaatattttagtttgatacacaaaccgtagttcaagttagttaattgatttcttccctagaaagtcaaggagtaacataatcaggttataaacttcattactagttatttaataatttatttctctggttacatttatatcttaggtgacatcagaacatatatgtcacctccttaaagatagtgtgaagaaaacccaccttatgttttcttccacagcttttctgtttgtgagcttttatttttgtactcaaagaatagcatccaacttttactttggtttccccatgtggttctgaaagagaagtagaatttcttctaaatccggaattgctcacatccttttaccttttaactttgttttaagcaaatgaacttattgttccaggtaaatcttccacagttgcatgcaggggaaagtatgatgtctcagactttatagtctcatggagatggagtgaggatcaagggccatgctcagcagaacttgtcaggacccagcagtttcacggacaccttttcttaatttttaaaccaagtctataataagtgctttcttccctagattccaatccagaaaacaatatcattgcactattatacaaaggagctggctaggcttgtgtctgtggggtcagctggtgttgcatttctgggcctcctttgtgaagaggatgaactgatggtcctgagaagttaggtgtcttggaagtagtggaaataaatcatgataactctttaaattaaagattatatattttggcctcaaaacattttgcaaagtcctcctattccaacccaatctgtttaaatgacccaacattcaacacattgtttctgataattcatcctcagaataagatgctgttggccataatctttgtctctagattgttttatctactcgcaaataaatttaagacacagagtatgcctaaagcctacagcagactttctggaaactcttgaatgtttggtccataactacttcttaagacaaagaagaaaaccttgtcagggtgtgtcattagtgcttgaatgtagggtttacaggatggggtggggtgggggaatcgcccttggtttagatgaatcattcttttccttgtcttctcagcaaacaccagtttctacagagaacagctctgccattgtgcattttctgtctccattttcctctcattctcctctccacgaaacccagagtagtcagtgggctttgggcaggaaagtggcaacagggtgtctggggaaaagccagttggctcttcttaccatcacaatatagactgaccacaggttattttaagagcagagctggtttccatcactctgagaagtgctcaactacagactttgggatgatatttgttatagctgtattttctccactcttagattgtgaaagtacatattacaagtatttattttattatctttactaaaattttaattaaaaagaagcgtgcttgccgcaataagtaaaaatacccaaagttgtttaaagaaaagttcaccttttcccttcatcctccattcccacattcctgagaacactgaagttaataaccggttgcaattcccctttcaccaaactgattgctcatagaaatatagataaacatatgtaaggtttttaagtttttttaataaaaatatgttcatgatatatacattattctgaaattttctgtatcacttaaaaatatttcatagatgtccctctgggccagtggaagatctggttcccccttacatacatatcagcaagctgcatgatatttcaactattgctactgcacagtttattcagccatctccctattaatgaacatttaaggtttttttttcagtttttagcctctacaaacagtacacaataaacaacatgacattaaatacttgtgctcttatttcagtaggagaaattccccaatgtggaatttttaagtcaaagtttattgtgtttttaatgctttaaacattgccaggttaccgtcccaaaaggctataacaattcacatttctgtttctctgcatcttcaccagacgagtgtaaaatggtattttactgtgctttcatttatattttgctggttattagtgatatttttcatattttcatatatttatttgccatttgtgttttttcttcctgacttgcttgttcacattgtttaccttgttttcttctgtcttgtgtagtgtaatagtttagactctgaagccaggcaacctgagttagaagccaggcctctatttcatgatgtaggtctttgggcaaagtacctaacattcatgccttagtgttttctcttttaatgagcagggataataatagtacctgcctcctaaggttgtataaaattaaaatgggcacttagggtaatatctagcaggtagatattggctattatcaatagtagctcttatcgttactattcttccagatactgtttcctgactctggggcaaagtcctgctacccctgaaccacatttttctacctcttagattttacttggtaattccatcagccactgttgggcatcctctgtgtttaatgcatcatcttagaccttaggagggatgggaggaactttaagaagccgaatttgctttttatttatcttgtagcagagcaatagatgtatattaggtagattacaagcttttaggttatttttgcatctaaagctgtcccttcttttccaataaatgatgtctgtggtaaagaatatatctgttgggtgttagtgacaaaatcagaatgctttgtgtctattttggctagtagttaattgtttttcttttattgtgtctgcattcctatttgttctttaattataccgagctcattagcagttattcttgctttattcatttcttatctcctagcatagtcagctcaagacaacaagcatctttcagaaagccactaggaattgcatctacattaagaacccactcctctgctctagcgtctgagaacataacacagtatttgcctttgttgaagggctcaagcggacgattcagaagtagaatagataactgttggtggtggcttgcagcacctagtactgatggttttgttaggaaacaccacaggcagtatacaatgtaaagcaagttctttgggttcagttaaatagattccacttgcacgtgttctcactcttttggtgtgaaaaattaggaaaggtgataggcaggatagaataaaatgaagtggtcccatctcccatatggagagcgcctgcctccaccacagacacatgttttgccctggaagcataaacagaagattgcaggaacgccccttcacctccatagccttcaggctcccatcgatagcatcaagataaacttggtgtggcaacagacttgagccatcatcttgtttaacatttttacctggaagtgaaaatggaatccagagaggctaagtagcttgcacagctacttaattgaactagaaccagaacccagtttcttagtattctggtgcccattttatataaacatagacagctgatcatggtagtttggatcattgctaaagacctattatatacaacaatcgtatggctaagaagattaagatgcttattttctcgttatccatgattagaaatgtaataagagactttgttctgtcaccaacagaagagacaagacgccttttctgctgtggttgtgagtgccccatcaagtgctgagatgtgactcatgtctttggggaaagtagcagatgagagagtacattctattccgactccatagacttaactgtggagactgagagtagtggagagctcagactgacaagaagaacagaatatagacttagaggcaccaggcatgaaaaatcataaagatggagatgacttctatcttgtgaatgtctgaaaagcctctctctctttctgttcccaaatccttcatctccagccctcatctctgccaccatctgtcggttttcttccgtggcctctcttctgtccacctcttcaatgttgggcccccaggattttgtcttcagactcactttcaccctctccctcaggacatctcatccactcccaaggctggaactccagccttcctctcagccttgcgcttaagtttcatccctttagctgtctattggatgtttccagttggaaattccacaggcatctctacccaggcgtctctacacaaagatgataaaaatattatcatctttttggcagatttgtttttcctgagttttctgtcgtgttcatggattcaccattcagcaggctgcccaagctagaaatgtgggatttgttaatcggccctgctgtgagactgggaggctggtgtgataacccaagaaagacattgtgggcctctgggtcttatcctttttaacccattgcctcagccctgcccgagtgatgcttctgaaatgtggaactcattttattctcttacctaaaaggttgcaggatattttagattctgaatgaaatccccaatcctttttttttttttttaagtgaaagcaagtttattaagaaagtaaagaaataaagaatggctatgccattggcaaagcagccctgtgggctgctggttgcccatttttatgtttttttcttgatgatatgctaaacaaggggtgggaaatccccaatccttggcattcaaatcccagactcatttcttttcactttttttttttaatcatgccctgcctttcagttatgatgagtgacttggtcattgctcaggtgtgacttgtccctttgcacctgctgtgccttctcctagaatgcgcttttctcctttcctggccaagtgttcttgtccttccaaatgggccttcccttgggaggtggtttctgacgaccaccccctagtccaagtcagctcccactgtactttaaactttctcttgtcttccttattacctgttgatatgctctctccccacctggtgttccttgggactagggacttccttcattcacatttcacataacttgagggcctggctcataagaggtgcttaatgaatatttattgaattaattagcatcttgtccttcaagatcagccatcattttctctatctcatcattcaaaatatattccttcctcttccccttcttgcacccagtcacagactggactctattaaatcctgtctatcatctgggctcatttccatcctcagtgtctgtctgtgcatccttttcattcagccagggatgttcagctcgattctgccccttcattccaagcctgtcccatattccattactttatgaagcctttcttgacacacagatgcttaattattctcttttgctttctttgtgttgactttgactctgccactggttgtgagcttcagaagggcagggatctcaccttcacttctttttcctcctagtgctttctttgtgtgctgcacactccctggcacacacagcggctctccaacacgaggcagagctttccagcagcctcaaccttcaggactgggcagcttttaaatgtatttgggcacctttgcaagaaaaggattgtgttaaatgtaattttcatgtatcttgttatcagagtgcaagagaagcagaaatcaaactgaaaagtgaaagcagagtcaaacttttttatttggacccagatgcccaggtaagaactatctaaatgtttaatatttaaaaccaaatgtgggagagaaaatcatcgatgggcttatttgtttatttgtttgctttgtttattttggaaaaacaagcaaaataactatagaaaatttggggaaaagaggaaaaataaaaatgtataatcttatcaccatagcattactattgtgaatatttgatattcaatagatgtttgaaaattgggagagatttattgaaagacattctcaagttcacaaagaacatctaatttacctgttaaaataaccatcagaaaacaacaggtatcactgcagttgcctgggagtcagtgataattcccgactagcccaggctcaggctcaaatacaaaccttttccatttaactctaacgataagtacttttctgtttcctcacaaacctcataaccatacgtatgtgtgtttatatgtctatattttttatttgcttttaagaagtttttgtttatcattgtaaaatatacataatataaaatttaccattttaaccatttttaagtgtacggttcagtggcattaaatacattctcattgttgtacaaccattaccaccatccatttccagaacttcttcattttcccacacggaaactttgtatcaaatgataaccttcctttccttcttcccccatcccctagtaacctctgttctactctgtgaacctgcctattttaggaacctcataaatgtggaatcatacagtatttgtcctttgtttctggcttcttaaacttaacatgttttcaaggtcaatccatgttgtagcatgtgtcagaatttccttcctttctgtggctgaatattccattgtatgtatatactacattttatatatccttgtaaatctgttgatggacacttggttggatacttgatggacattggttttgttgttcatgatcataattttcaagctctgtattttttcagttcatccattgagtaggtataccatcatgtctttttttttttgtcttttttttttttttttttttgaggcagagtcttgctctgtcgcccaggctggagtgcagtggtgcaatctcggctcactgcaagctccgcctcctgggttcacaccattctcctgcctcagcctcagcctcccgagtagctgggaccacaggtgcccactaccacacctggctaatttttttgtattttttgtagagacggggtctcactgggttagccaggatggtctcgatctcctgacctggtgagccgccagcctcggcctcccaaagtgctggaattacaggcgtgagccaccgtgcccggcccatgtctttgaccattgttataaactatgtgtgtaactactataaaccatagaaaccgattatataatagcaacactattgtgagtaaataagtgtatatagcttttccatattttattccgtttcctttggatgcatttatgatgtttttttaaaataagagcataacttatttatatgtttacattttcttttaaagaagcttgacttctcatcagctgagccagaagtgaagtcatttgaagagaagtttggaaaaaggatccttgtcaagtgcaatgatttatctttcaatttgcaatgctgtgttgccgaaaatgaagaaggacccactacaaatgtaatttttcattttaaaaataaacattaaaaaaaaaataggcagaggtttcagatgtacctttacagtgcagcctggataagaaatcctagtccctggtatcaaagaggtgcagtgtttggatcaggatatggaggttgttagcctgcaaggacaggatgttcgtgatggaagatgagggtggcaggtttgtgctcagctttccaggagacagagttcatcttagatgcttcagggaacgcaactgtgttttctatggaacatacattacgtagcaaaacacataaaggtaaaataattgttttgtttgtttcctaaaatgttttataagctaattctctgtatgcagaaggatgagactgtttagtagtaatttatggcaacagtcctaaataggtcttgtcatttctcttttgatagcaacattcttttgtccctgtttgagccatggtgatcattggattgttttgttttgttcaggttgaacctttctttgttactctatccctgtttgacataaaatacaaccggaagatttctgccgatttccacgtagacctgaaccatttctcagtgaggcaaatgctcgccaccacgtccccggcgctgatgaatggcagtgggcagagcccatctgtcctcaagggcatccttcatgaagccgccatgcagtatccgaagcaggtggggagtatgagcccagcattcccactactcagactcactttgcatgctacctaaatgcaccaaaaatgctcaaattagaccttgtaatgcacaagtggggtcattagactcttaattaatagtatttattattagacagtaaaagcaagctgagaaataagtggcttttaatttcctttcttctttctaaaagttctcctagttacctccctcaccaaatagactttttgagcagatgatgaactgtttgtcagctaactagtttggcactgggtgctttttactagttgtcctgtttcactgttctttgctgtttaatgttcatgggatttgtttaacgtagctgtgaattctgcttactgaagaaaattgtttgcctcctagggaatattttcagtcacttgtcctcatccagatatatttcttgtggccagaattgaaaaagtccttcaggggagcatcacacattgcgctgagccatatatgaaaagttcagactcttctaaggtatgaatggcttttacgctttggggtggtaaaaagcaatctgaaaagaggcctttatgtgatactataaatccttaatgaaatcaaacataagccatatttatactctaaaagatgtagaatatgctacctgtatttactctgaactttatgtcttgattttgaaggaaatgtagtcctatgtgtaaataaaatgatccacttgactagacagttctgacatcctaaaataatttgcaaaggaattaccagcttaatagtaaactttctgtgttagaaggtacatgtatgatattcaaatagagtttcttctatctgttaatttgcctcttgggttctgaaattctattttggtccacttacacttatatatgaggctggagaccaggagatgcccttggctcagatgacctggccagcagtgtcagtgattcaggtccacttggtttttgctagaaggggcagagttttaggtggaagatggaaagaaaacatacatgatgtatgtttggtttttttcaaagtagtgttcattacttgggaagtgcctaggcatggacataccatagaattattaaatattagaggtcatctagtccaagatgtgctttcatatttcaggacactgaggctcaccaaggcttagtgatctgctcagtgtctcatggctggagctgccagggggcacttgactgccacttcgtagcaccttgtgctacctggttagtgtaatctgttaagtgctattatccttgccagttttacatatttttagttatttaaaaaaaaaattgtgtggtcatctgagaggcctgaattcactgacaaggactggtcagcagtaggagtggataccccagaggctgtgagtgaagtttactaagttggattcagagcttcctatcttcacctctatgggcgcccatgcatcacagctgtgtccacaggatgcacgatggccattgagaaatggattttggagtcagaagacctgggtgctgcatgcttaactcatctgggtcctttggacaaatcacatcacctctcatggcctccatatgttccttctgtgcatgaaggatgatgttacttcttgcctctgccttcctcatagggacagtgttaggatcaaacagatcatgtatgagtcagtgctgtgggcaccataaatcacagaaagcccagaagacatcgtcatttattacagccccagtcaagtaaaagcccatttacccaggcacattggttccaacagtaagcctttttggctgatgaaagctgtgtaaagtttggtctctggagagaagctgttttatttttttaaaccaagtctgtaaaaccttggatgagaagctcttttagctcttttatgttttgatcaataatcaatgaaggcccaatataagatctcctcccccgaccgtgtatgcaacacatttccaaggcccatccacagcaactttgttacttctgcctgccgcatgcatggtttgaaatttggcagctcatattggtgtaaaaatcacatatcactgtaggctaaacttacctctgcacactcctccatgtccactgagcatctgctgaagtctgctttttcttcatttttttatggaatgtaaagctcatccatgtgtacattattcatgcatttacttttctgccacctccaaagcattcaattaaagcaggaattaaggctcaactatcttactttagcacagttttggcagagatgttacagtgagatgatttttttctgtctgtcaaagttgtttcttcatgttttccaagatggtctagaacatcatttagagtaaattttcattttggaggaaatttttatgaaaagtctctgtaggtatctcctgtgaatagaggttttaaaaagaaaaagaaggggaaaaaagcccaaagggaaaaaataagtttcttactctgactttcacacatactgtgttctatttgctcccttcatatgtccgagagctaagtcctcattcactgcagaaaaggcttattgatgttttatgttttagctttaaattttatgaaattactgcattttactccacaacatattcatcattgttagaaccaaaaaatcttgaacctgaaaatgtttaagtaaattgaccctgcagctaggtaggccattgtaccctataactcatacacctaagaccccactaagtcgccccacccagggaggcaagaacatacctcattggagaaggggggaggtcctagatgattccctgacatctcttccaattaggatgtattttccaggttactcatgaaggcagcagttcctacagcatgattatggtaggattataaagttttgcaactgaaagggatcatgaaaagtatagcctagcccccattttcaggtgtggatagtggagctcagagaggtttgatggcctacagagtcatacagctggattcagtgtgacttagagacagacagctctgtcatctagatccttctggatccttctagatccttcctgtggctgatggtacacacagatcaccggaggtcttgtcagaacgcacgttctgatccaggaagtttggggcaaggcctgagactctgcatttctacagtgatgctgatgctatagcacactttggttttggagtacatttcccaaaattggtttgactttgatatacttatgtaaaagacccttcagtaaaaaaaaaaaaaaaaaaattaagtaatgtaaaagacccttcactgtaactctgagacaatcaaactttgcattgatgacaaagcactatcacagtacagacaaatttggaaaaattaagcattatcttttttagcaataggggtatagatgattaataataggtctgccttaggctaaaagcaaataagcttcattgtacactgtgaattaatcaatcaatcaacaacaaaccaaaattgatcattaggaagtagaaatagcagtaattcatgtttagaaagcaagaatatagcattgagaaccccagcctaactgaagtcagtatcttaatatcttatcccttatattgtgggaatcagcataagctagtgcgctttaggagctgtgaaagcttagtattttaattagtgttctcatttcaatcctaataatgtgatatattttgatatggataccaaatagtaattattaataactcagtagacttataataagtagcacttagtcataaagatgtatgaaaacctctgaaacagcatgtttgttgcccgtaaagaccaaagaagagacatggattttggaaagtcttcgttctgtattctttgagaatcactgctagagaatgcgttaaataaagtactctgcacagagtgtgaatccagccatattcattactgtatgatgtgcttttctatgcatccaatgctatggtaaggacttatttagtgagcatgtaaggatggctcttgaggtcacagttctttcagtgagatgcagtatctcatagctttattctcatgtcttcaaggtggcccagaaggtgctgaagaatgccaagcaggcatgccaaagactaggacagtatagaatgccatttgcttgggcagcaaggtaaggaacaccttttataccttttaaatcgatatagataggtgcatggatgggtcaataggcctattctgtttgttgttcagagacaaagaggatttgaatgtgtaaaactgagaaatacataagcccagattttgaaaaaatcatttggtagagtcacagagaggatagacactgtctggagaagtgctacctggaactggcagggtgcacggtagtgttagctgcagagctgggattcaaggacccaaccacatgcctccagctggaagtcagggcaatccagtgaggcctggggtgatctttatctcttgactctacttgttaagcatttgacttgtgtatattgtttcctaagcacaagccattggctggaactgttttctatgtaaattgatttagttgtcctcatccccatagatgttttccatgtttttagataatgagatttctgttggctatagccaatggaataataattagacttctcatagaaactagacttaaataatgaattgattttggtgttttggaaacccagtttagaaatgttgctttgccatttcaggacattgtttaaggatgcatctggaaatcttgacaaaaatgccagattttctgccatctacaggcaagacagcaataagctatccaatgatgacatgctcaagttacttgcagactttcggaagtgagtttcaaggtcttatttccacacctgaaaaatagaagctgtgtagtggggagggaggaacaggggagcagtcacttaggttgctcgatttagacatcagaggggatggcaaatgagcgtgaagcatttcctcaaacccttgagaagaaagatggggtgaaaatcagaagaataaccagttaatttgaattctgtagaggatgttttgggtggtgctgtgaagggtggactgggtaaggatgagcctatggtggggaggaaacagttgaggaaccttgtcaagaggtgagaaaggactcagcaaagccactgcaagtgcaaacaggaagaaggggacaaattcaagtcgtgccaaagagatacgatgactgggtcttggcttggggtggtaatagtctaagataaataacttgcaaggtttctaacttggaagtttctggcaccagttgttgcttagcttgtggcagcattgctccactctgcctctggcctcacatggtcctcttcctgtgtgtctctgtctaaattcccttcttagaacactagtgataaagcatcagggccaagcctagtgacctcatcttaactgattgcatctgcagagaccctgtttccaaataggtcacatttataggtacaaagggttgggacttcaccatgcttttggaggacacaattcaacccataacaatgaggcaaagagggagcaaggaatgtgtgcaacatcacagggccggcagcttccccaagtcagtctcacccgagggtctgtgttcttaacctctatgctgttttgctgctacatcctaaagagttcactctgaacctttgaaactgattttctttgctagggagatgggtcttagaatttttctggggaaattctgggaatgtgaaagagctgagggcgctagaagatgtgaagtgaaaagaatagctgagagccaaatgctaactattctatgccaaaggtatccttgtttttttttttttttgtgcatatcaaaatagcaatcttatcagtttgtctagaactcaagaatgattgcttagctttctttaaccttattttacctttttcttatctgtcttcagtagtaggaatagaaacgatatgagtcatagaaacaggctcaataagttctgaaaacacagagacgtgttcctaatcagaatccaatcacgtccatgtcagcaggcggcttcagccttcacagcgacgtgaaatcccttgtcaagaggctcaaaaaggtagaaaggattctcaaggtctctttcagttatgtgattatacagtttttgactgtcttgatgtttcccctgtttggagctttaatgagaagtgcaacctcagttttgctaacatgcagctaaggttggcctgttcagcaaagcagtgtgcatgcccgctgggctgatttggaatgaacctttcacagctcacgtagggaattggagaagggggagaggaggatactggtgaaggatgaggcctgctgggttagccttccagggttcctggaccatataggtgccccaaattcccagtcactatctgacagttttatgacctggtaaggacacaggtcttggccagggagtgcccctggatccctatgaatctgttattcatgaaagactaaataaaagaatagtaccctatttttacttttaaatcatagaggttctttagtttacaaacataatacatgttcattttagaaattttgagaaatacagaagaataaaaggatgaaaaaaggtttactactagttttaaccttcgtggtgaacttttggagaactttttttttttttttgagatggagtctcactctgtccctcaggctggcgtacagtagcacgatttcagctcactgcaacctccgcctcccgagttcaagcgattctcctgcctcagcctcccaagtagctgggactataggcgcccaccactacgcctggctaatttttgtatttttagtagagatggggtttcaccatattggccaggctgatctcaaactgctgaccttgtgatctgcccgcctcagcctcccaaagtgctgggattacaggcatgagccaccgtgcccagcctaggggggaacatttttttttacgttttattcctttacattttattttagtttatcttatgtagctatgatcatactaaatatgtaatatttccctgcacaactcaagtattttctgaaagtgttatatatacatttttatagacatcatttttaatgcataaatattataatagtccattgagatagaccatagattatttaactcttcccccattttttgacttttttttttttttccgagatggagtctcgctctgtcgccaggctggagtgcagtggcaccatctcagctcactgcaacctccgcctcccaggttcaagcaattctcctgcctcagcctcctgagtagctgggactcctgagtagctgagtagcgcatgctgccacgccccgctaatttttttttttttttttttttttttttgtattttagtagagatactaaatatctcaccatcttgcccaggctggtctcaaactcctgacctcaggcaatctgcccgcctcagcttcccaaagtgctgggattacaggtgtgagccaccatgcccagccattttttgacttttaatgtgtttctgatttttcagaattatacctataagccacagttagaatctttaaaaaaatcttctctattggtagtgggtaatatattatcatacatactatattatcatatagtaattattgtcattttttgagtttcaagaaaatttcattcttactaattttttcaaaaaccagtcacctttagttggatagatttcaatattttccttcgctcaactaccatgcaactcttaataaccatgaggtgggtctgcgtgtacttaggaaagtgaatacactatattattaaggaagaaaaaatatatctgtattactatattttttgaaagaaaatatatatttcttttgtatgtaaatgaagaaatggataagcaagtagctatctagatggaaagataggcataaaaatagctatttaggatatatgccaaataatcatggttatctctgagggatgggttgatgggtgatatttcaccttccactttataacattctgtcatttttatatgaacttttaaaaaactaacacttttatattcagacaaaacaaacaatgaagttttttatatgtgatggaggttggagccctgtctcagaagttacttcctaggctggttagcttgagacttccccacagtggcggctcctcaggggcagccccagtgcatggtcctgtcttcagtggaggctggggagtggggcttcacatggtcactaatttgaaagtgatgggagcagaaagcctgtggccaggcagaaaggagcccagggaaaaccaagtgtgagttctcttctgcacaccacttcttcatgcatgtgctcagcaggagggcattggtgtgaagggtgtgctccaggtggccagttagagacccagaaacctgaaaacagggatccgatggtgacagcatagaagacacagcaggataagtgaggccacgctcctcaataagtattcaaagaaactttggtgcccactccccgtattcttcacaacagagttaggggacgtggaggattcctttttcattttttaaaaatctttgcattgctatttttctttcctctgtatattttacaggaaataatctcatgtcagtggcctgggcaccggcttggatccaaagctattgtttctacccccatgattgtctcaaaatgttatttaataatgcatgaaaaaaatttcttcacgctgtctcagtcttaacaaaacagctgccaaagctcataagccactttcctttttcccttgcaataattacccagggatatgttccaagatttagtaagaaagcgattctgtccgatagatgatattgctaacattttataagaagagagacttggtactttgtatttgatttgttcatggtggtatctcatggataagatggtatctcatcttttccaacttctgcaggaaatgcgaagacatgaaggcaaagtataaaaatagaacgttttctttaaaacgtagacctttttaatggtactacgttggatagtttaggtaataatactactaaagtttttgcgtatgcagcttaatgtgtctgtgtttatttgtacactcatcttctttgcatccaggttttacagtcttaccccgatttcgctctggttacactgcactcaagccaagtagggctgcttgactttctctaaacccactggggacttccctctgccatgcttttctctctgcccaaattgtgtccccttcctgcctcatcaagcagcacataaatcacaaacacatgcagcatacacacttccccttttcctttgtctttctcagggaactctactcatctttcaaagcccagtctgtggctcacttctgtgctgggagtcctggaggcggttacttggcttctctgcctgagccgcctcctctttttaagggtggataataacagcccctgccccctaaaaccgtggtggggaataaatgcaaaaggcattaaggtgatttctcccaccatgaatactgatctcatcccgtgttccctctcgatagatctagatactctgccttctggtagaggtttgtacatactctgtgaaagtgattgccctcatatgccgtaagtagcttacagtgtctactggacttttggcttcttgaggaaagaaattatgtcttgtttgcattcctccatggtcctgagtacatacattgcagcatatcctaagcacttgataaatgcttattgaattttcttcttagacataaactcagtggtttttgttgaaacaaaaatatctcaaatttctttcaatcatatatagttgtttttttttaagtgacaccaaagcttttagggaatatttcctttcacaaaacacagttagaagattaaactcaccaccaatagcagtccaaacatacctgtattgccagctaatcattttaacgagccaatacaggaagtcaggaagggaagaccggctgcagaaacacttagataaggaccccaaatctgttggcatgggaggactgctagttgatgataccattcccatttcctctgtgggaattgttgagtcagcagaaatggatgggcagtgggaagggaaaattttcctaagagagagtttgagcctcacttctacattcacacagagacaggagcagttcccagaggccaggcatcctgcaagtgtctgtattgcatgcttacttaattcgtgtaattttaagatgagttttcatgttcaaggattattttataaattttgcatagaatataggtactctttagcaaaacaaagcaaaaaaaccaaaactattctcagtcatgaaagaattcagtttgtgtaacacgcacacaaccaccactttggaagtgcataaaaaggcagtaaaatctttattgcctgtgagtgtttgatgtctaataaaccagattcaacataaaccataaacttttgaaatgggtttgagattgggtttttaaaaacttaaagctggcaaaaaaaaaaacaacttttaaaagcccatgtgctacataatatggaactaaactcagaaatgtgcttggaaacacatggaaagaacgtctttacagaagcagcaactagaagtaaaatctctcagcagagggaggaaatagaataagaaataactatagttaggcacagaaggacacaatacactataggaagatttccagtgaagatcatttaattaaaatatgttgcttagaaacgtattttaattgtgttccacctctctcaaaaatttatatgtggaggatgttggagtgatcttaaaaatggtgatgaagatgcctgttcattcataggtggaaataattaggagggggtgaaatccattacccttgcatacttacttatatttaaaagtataatttgtaataaacagagtatttctaactcaaagcagatacaacttcataggtgtctctacaattttgtggagtgcagtgtcttgtgatatgttgtggtgttgaattcctccactgaagaggtgagcaaggcaccgtatgtcaagaaaattgataccttcataaaaccccctgtctgaaggttgatgcccctgaagagttctatgtgaagctgagagaggctccacaagctatcatcgtaggagtgcccagagcttgggagatgctgggtcaaaagctctcaggaaatgactgacccttgaggggaggctgctgcccctcctcccaccaacaggaaaggatcttgtgtgtgtgaagcagctcacaccgcaggcacaggggcaaactgtaggggagtgcttggctgtacctggagagctcttggccagacatcttttcaacggaaggcggaacatgtgaaaaatcattgacttgccttcctgaccattacctctttcaggaactgttcatttaaactcagatgtaaacagaagacaagtggaaatgagagggagggaccctgagagaaagagatttagcagcttagagctggcgatgggccacgatggatcttctcaacatcgtctctagtcttaaggatgcaggaatttagaaattttagggaagtcctaattcaggtgacaaatattccaagatgtactgaggagtgacacgtgaggctgcttaatagtcagcagtcatgtccaaagaatctgcaaaattgtaggtaggaacttttcaaaaatgggaacaaaaccaaatgctgaatctgccagtccctgtgctttggtgatctttggcaatgttctaaaggagatctgaaacaggtggcgtaggaaggactgtgaggcggcattgtgtttcctaagactaagtcatatcgtgttgaactagtcatcctaactgcatttcttctctctttgtaactgcgccgctaagcttgtgtagtagaggagtgcaaaggcttcagcagaatgtatttaccacgtgtgggtgctgtggtagcctgtgaatgagtcaaagaagcgctgcacacgtgagtgggcagttgttcaactgctggaaaaaccagatgctagggagggtgatgaatgagctagtgtcagtctggaaatgggcctccagagacttgggaaggagcctgttcttggcaatatactgtgcagtatctttatcaatgacttttatgagactataacatgctgattaaatatttttatgacataaagctattaggaatatctaatgcagtaggtggtaaaatctggatctaggaggactttgataaactagaaatagctcaaacacaatacgatgaaatttcagcaagacaaaaattaaattctcttctgaggtccaaaaatataattatataaataaaggacaaagaaataagcatgtgaaaaaagatgtaggaattttaggtgactgtaaatttcctgtgagtcactaggatggtatggctacctaaaagtaatagctttgaggctgtgttaatagacaggtatattgttgaaaaccagacagaggctgtgcacccagctgtgcacccacactggccagatgtatgcagttccaggctctgtaatataaatggcaggttcttctgggagagaatgacattggggcaggtgcaaaagtgctgagaatagagggcttcagaatgtgtagtataggtggttgaaagatagaggaacatcgctagaccccttggtgagtagaagtttcagggaggtgaatttcactatgctatgagcaagagcagactagtgtcaaaaccgctgaatcagaagtctcattgtcactaggaagggtgaggcagtagcagcacttgtcaggagtgtcacaggggattcctatattggattgagtcagaacaaatattaatacaacaatttcagtgagcttcgactctgaacccagcattgtgctggacactggagcctaagatgatttctagttcctgatggtgatgattgtatgttttattttattttttatttcaataggtttttggagaacaggtggtgtttgcttacatgaataagttctttagtggtgatttctgtgattttggtgcacccatcacccgagcagtgtacactgtacccaatgtgtagtcttttttccctcaccccactcccaccctttcccacaagtcgccaaagttcattgtatcattctactgcctttgcatcctcatagcttagctcccccaaatggtgatgattctaaatgagccaaatatttatggtgaggctggagtgattcaggaacacttgagctgtaactgttttgctgatattctttatctagacctgtactgtgtagtgcgcagccactagccatgtgtggctgtcctgtgaaatacaggacgtctgaattgagatgtgctttaagtataaaaccagtaatacatatctggttttaaagacttagagtacacattttttatactgattaaatactgacatggtaatattttggacctattgggttgagtgaagtatattattaaaattaatgttaccagttcctgtttgctgtttttcatgaggctactagaatgtttaaaattgtctttatggcttgctttatatttctcttggaagtgctgctctagagtgtcggttttagagttaacttacgaatgtttaatttttctcttcttttgtttgcagacctgagaagatggctaagctcccagtgattttaggcaatctagacattacaattgataatgtttcctcagacttccctagtaagtgtcagttctacataatagacagaatttttattagtttgggttttacttcagtttgagttattttgaatatctttgcagattatgttaattcatcatacattcccacaaaacaatttgaaacctgcagtaaaactcccatcacgtttgaagtggaggaatttgtgccctgcataccaaaacacactcagccttacaccatctacaccaatcacctttacgtttatcctaagtacttgaaatacgacagtcagaagtcttttgccaaggtgagtgtgaagatggaggtttcattcttgatgtcaaaccctccctttagattcagcgtcccatgttcttttataaatacttacatagtctgactttctgttgttttttcttattctgttttgtttattgctgcaggctagaaatattgcgatttgcattgaattcaaagattcagatgaggaagactctcagccccttaaggtttgtttttttttaatatatgttcacctacgaattctgatttttccattttcaaaatgcactttcatgataccgtacaactacaacagtttagcacattttaattgacacaaatcaaaaatatataatgttacaatgtataaacatatatactcaatcttatcgaatatggaatatttaggttctggctcctaattgactgttttttattctttttaaggatcagagtttcttatacacactcaattcagcaaacacttactgttcacctatgagccaagtgctcatactgtgggtgctaagaattaggatatgaataatgttgatcatagaaataataataactgatcaacaattgataattttattaaatgtttactacagtatagtaataataatagcagtagattataggtaacttttattgaaagctgtttgtactccaggcactgctctagtgtgtgtttaactcttttggttctcagtagtcttttgagttaagtattattattatccttttttttttttttttttttttttttgagatggagtctcgctctgtcgcccaggctggagtgcagtggtgtgatctcggctcactgcaagcactgcctcccaggttcatgccattctcctgcctcagcctcccgagtagctgggactacaggagcctgccaccacaccccgctaattttttgtatttttagtagagacggggtttcaccatgttagccaggatggtctcgatctcctgaccgtgtgatctgcccaccttggcctcccaaaatgctgggattacaggcgtgagccaccccacccggcctattatccatatgttttaggtgaggggagtagtgcagaattttttgcctaaggtaaaacattagtggaaccaagattcaaacccgggcagtctagctccataacccaaattgttttactgtgactatgttaaagtgacttcctaagaggagaaggagacaaagatgcaaaaaaaaaaaaaaaaaaaaaaaatatatatatatatatataaaatatagtatctgtcctcaagaaattcagtcaagtgggaaaaacagtcgtggagaaaaagatcttggtggacagatggtatgaaatgaagttttggacaaaactgaaaattaatacagaaaaatgctgaggggacacatggaaggagttgacaatttcttgaagaatgcttgagcgttttcttgatgcatgcagaagcgaaggttatttggacagaagaattgcataagaaaaggcatggaaatgtgaaagggaacagtgagcaaggcatcatccagggctgtgacctggaagggcaggaaggggagcaggcagatgggcttcaaggcaagctggaaggtgggcaggacccagcagtccggggctcacaggcctggggcccatcagaggtggcgatgctaagtctatgccgtaggaatgcctcctcctttacgatatatccaagtttaatttcttacttaatcgaaccgtgatgtttccctttggtaactcttattttagtgcatttatggcagacctggtgggccagttttcacaagaagcgcctttgctgcagttttacaccatcaccaaaacccagaattttatgatgaggtaagtgatgtttttaagggaaaaccgaatttgaccagttttaagggaaactttaatgtatttgcctggtaaaggaaaattcaagagaagctgcatattacactgaaattacagagctagaactgcatgttgaagtatttcttttatatattctgattgtaaatgtaacattttcattattaaaagaaatagaaatttggataatgcagataatacagaaaagaaaaagtcataatcccactatcactaccacaattaatattctggtatatttcctatcaaattcatactttagttacatttgttggacctgagaatctttctttcttatcattgggtttgcttacataaaatataatgtaattcattgaaaccactgtatgcatgctacttgggaatgttctatcctggttcttcataatgccttggctgtggtaacttagcgtagcagttactgtcctgtgttttccagttcttcctagaaataccatcaactctcttcctgtttctgagtggtgaattcaggattcatttcttgcttggcacaatttatagtctcagtatctttgagtgcaaatgttaatatccgctcggagaacaagtgcacgtttatgcgttgggtaacacatactgtctctgcttccactgagagtttctgtgtttttagaatattttgttgttattttgtcttcccttgcagattaaaatagagttgcccactcagctgcatgaaaagcaccacctgttgctcacattcttccatgtcagctgtgacaactcaagtaaaggaagcacgaagaagagggatgtcgttgaaacccaaggttgggggggcttaccattcctttgattttaaataattgaaacattaggttcttaaattgtattaagattctgaatttccatctttttgcaaagggatctttaaatgaattttataggtaacggatatgtagcatgtctgggttgcatatgtaatttttttttttttttttaatttttgagctcaagctgtccttccacctcagcctcctgaatagctgggactacaggcacgcaccacacccactggctaatttttgtatttttttgtagagacgggatttcgccatgttgcccaggctggtctcgaactcgtgagctcaagcagtctgcccacctctgcctcccaaaatgctgggattacaggtgtgagccaccatgcccagcctgcatatgtacatttttataaaagaagattgtagaattctaaccccgaaaaggcctaagtacattgtagacaatgttctgcagagattacatttagggcattttaaatttcttactctaattgataggaaaagttcttaaaaatcagacggttttacattggcttgctttcataagttttcatacactcacagtgttctgttgttgttgttgttctttgttttcaacagttggctactcctggcttcccctcctgaaagacggaagggtggtgacaagcgagcagcacatcccggtctcggcgaaccttccttcgggctatcttggctaccaggagcttgggatgggcagggtatgtcccattttaagattgggtcatcccaatttcttcagaaaacattaaagaacaactaaaacaacaataacacacaaaaagcaaacagtatttttgctcttccaccattttgatattagttattcattttcaagtaaactttggccaattgaagacagtgctgttagcagttacctcaatgtcagaattacagtttgggcattttgtaagccctgaactagtggtgtctcagcggaaaaatagagacttggaaatctgggataaggtctgtctctgccgactggccatgctcaaataaagatgagttcttagggtcatgcaaactattaggaattttcctccagcttaaagtaagtcaagtacgccaaatctctcacccacagggttgcacattctgaaacctttctgattcttgaaagcctaattttccccagatttctttaattgctttgttggttttgcattctttttagccatcttaaattttatagactgcggctttataacatgcttaaataaagcctgttctttttatgtttgtctgcatttaaatgatgccaaatttaagttcatattatagacaaatagttaaattttcccaaagaagaataaattgtataattgagcatgacagagaaatggaggtttcaaaagttgaaattagtgtgagcagacgattgaccctttgcctgtgccaggcctgcatattatgctgtttgctttatctggcaccttttactggcttcttcagaatcctgagctcaagttgggttcagatgctggtgtaataggattctttccctctcaaatgaacaataactcacacagctgcaaagaaacagaaaagataacttagaaaatccagtaataaaagcactgtactttgggggaagaaagggggcagaaatgtgtatcagctgcattcctgccatgggcccggcacagtcgccaagtcactaaagttctctgggccctctttcagtccctcatcattaccctcattgatgatcatgttagagccaaaataactaatctgtagggatattgtttcttccatattttttttagcattatggtccggaaattaaatgggtagatggaggcaagccactgctgaaaatttccactcatctggtttctacagtgtatactcaggtatgtgctccttcaacaaaattagcagttgctgccctgtgacaaagtttgcaccattttgcaagaagaaaaaaatcctaatgtgttatattactatatttttactctatagatctttttctaaagaaagaaagtacaactgaagtgcttatatgtattcatataaatgactagtacaagcatcattttgcaacagatttcccctttcattggaggatcttcttgatgttatttgtacacgatcaatttttagtcttaataagatgaggctgggtgtggtggctcacacctgtaatcctagcattttggaggccaaggtgggcagatcactttagcccaggggtttgagaccagcctggccaacatggcaaaaccttgtctctacaaaaatacaaaaattatccaggcatggtgatgtgtgcctgtagtcccagctacctaggaggctagggtagggggattgcaagaggctgggaggtcaaggccgcagtgagccatggtcatgtcactgcaccccagccagggcgacagagcaagactctgtctcaaaaaaaacagcaacaacaacaacaacaacaacaacatacagcaaaaaagcatgctgcaagaaacaaatgcttctatttccacagcgtgtattctaatagactttcttcttcttttcctttttccctacctcaggatcagcatttacataattttttccagtactgtcagaaaaccgaatctggagcccaagccttaggaaacgaacttgtaaagtaccttaaggtatcacatggctttcttagtatccccttttaagtgagtttggagtaggttgggttttctctttggtggtgagtggtgttctcaccccttggaagctcttacctggatgtctcacatcagtagcttctatgaggtttagatagtggtaagaagtggacctaggaacggcactactcctgcctgtgtcctagtcccatgtatcctttgctcaaggcaggatctctaaaacatactgtttctcacgcatggaaaacccctcacttgagacggacctccctgggtaccgagcacagtgatgggcacagaagcagagacttcggtcctcacccttagggaacttctagttcattgtaggagatactataaacttggtgactgcatgctaggcagacaaatcaaataaagaaataatgcacagaaccagtcccagctttgtgcaaggggttcctggcgtgtctaagcagcaagagccaggcagggtttgtctaggagagcttcatccagaacgtggctgtggggagcattttggaaaggggaaatagctaaaagggcatggggacaaaacaagaaatgtgagaaatggaatagaaatttgtttggtttaacaaggaaaatggaatacatatccacataaacaatgaagtttttatatgtgattgcttgcggcccctccctccatctcaaagacagccacacagcatctctctgaccctgcttcctctgtcccagctccctctgactcctctccccttctgtctccctcttctggtttatggccctttgcgattccatgggcacacctggataatccctatcataaggcctgactagcagccttacctcccctgggccatgtgatgtattcacatgtgctgaggactaagacacagacgcctctggggacattctgcccaccacagccttccctttgttttagagggagttcttccatccttgtttggaagagtggaagttactttaggctggtttacttttagaaggataacatgaactgtgccattctgtgtccgtagagtctgcatgcgatggaaggccacgtgatgatcgccttcttgcccactatcctaaaccagctgttccgagtcctcaccagagccacacaggaagaagtcgcggttaacgtgactcggtaagggaggtggatggatgctcttcctcacttctagtctgtccacatctggagcatagtcatgcatagctgggatgctactgtgtgctgaacattacatttaagaaatgtctttgatcccatgtgtaaggaccccatctaattccttgtctccttgtttcctaagtgctgatagcatcatcattgttctactactgctgtgataataatgaaatgtttccatttttacatattctttgctttattcactcctgtggtgtgtagggtcattattcatgtggttgcccagtgccatgaggaaggattggagagccacttgaggtcatatgttaaggtatgtaaaacacactgttctgatcacttacatctgtggctctccagttttccttctaaggacttattttttcacaagcctggttatttgaggatgtgcttgtaacgtatgctttctcttctatttctcatagccaatgcttgtacctgaataggggaggtacgaagagggacagccattcactaatttacttaattccattccttcaattatgtttcttttaatgggttttccaaataatatgactcaatgtggaagtttaaagaagaattttaagttgttcttggctaggcctctgctaacgttagttgtcttcctttttttttttctttccatctaaactttccagcaaaactgctcctcccagataggaaggttagctctggctacagtcaaattagatgactctgtgggacagcaagagatgttgttaggataaacatcaacaagttatttatttatatacaacatccagtaagtagagtggcagttactattctaaacagatgcacatattctgtttactattaaatacctttgtaaattacaactatgtgataatttaaaaagtaaagttctggtcctttagggtatcagtcatacattgttgtgccacacattccttgaagcccctggcacaggtggagttacgggctggctggtcactgatttgaccgggtcagatgactcacatattttcttgaagacatcctggactcctttttatcacatgacactcacccttcccatctttgtatccacaccttcctctcccacaaatgatattgtagctcagtccctgatctccattcttgggagtctctcaagctttcagcccacattggagagccagtgcattaaagtctctttctcttttcttcaaagtacgcgtataaggctgagccatatgttgcctctgaatacaagacagtgcatgaagaactgaccaaatccatgaccacgattctcaagccttctgccgatttcctcaccagcaacaaactactgaaggtatgtcaggagagtcagtgtggctctgattgaaactgattaacaggaattcactccacagcctgatcaatacagcctttctgagtgctcttagagacaaacaccactccctaaaaaggggtagtgttctctgataccaacttttctaattgtgtcttgagagaagagctgcaaaacaccactgtgttcagtgttggctcttgaggattaatagtcattatgttcaaatcagtgatgaaggtctatgacttagagattctaaagacaagtgtcaccaagcagagggcagtgaaggggaaagactacacccgtaaccccacagagcctcgtgctggttgtgccacgctgagcacaggtgtccagtttcccggcaggatgcagctctttgttgctaaacttgtgcaagcagaagacatctgccattcaccgttggctctgatcataatgtgccaagaggtgcagccgtgttttagggtcacacctgctttatgtcaataatattgtcagcctgagagagttcatgtcttacctaccagtttgttgtgttcttactgggtcctgttcttttttcttttagtactcatggtttttctttgatgtactgatcaaatctatggctcagcatttgatagagaactccaaagttaaggtatgttacttcaagtggaagcttgtgttcttaggggaaaagaaatctctttcattgctttgtagtgaacgtttcttcatgctttctctgtgccagttacaggactgttctaagtgctttacaagtaataaatcattttagcttcataacaacgctttgaggaaagtactgttcttacctattttatagatggggaaactgaggccagcatgcttgagttacttgctcaaggtcatgctaccagtgagtggagcagccaggttttgagtccagtctggccccaaaggttgtattcctgaatcacttggttattaacctaaagaaaaatatgtcttttcctttgattagcttagaaatcttcacgtttgttgaaatggaaattgtggtttcagcataaattctaagtgtcattacccatgatttattaagtgtcttgaccgtcatagacatttattcttagatgggagtatctcaccaatctcatgttctccaaaagcaatcaacagactctgagattatccatctcgttggggcagatgcgcagtctcaaatttcttctctgccccagcatccccttgtggtgaagcctggatgtgtgttcctttctgaccgtgggtcccccctgcttcccctggttcccactgcactcagccctgagatgactggtcttgtctctggactggtgcccactgaggtgtgtttggccacctcaggctctctgaggctcaaggtagataagtttctataaagttccaatgtagtaaacagaagtggcagtgtcactttctcattttgaagtttccagggctcctctgagacctgcagagtcctggagttgtccttgtgacagtgaagtagtgtagttgtttggaggcagggtctggttgaagtattatagaaggagcttgtgcagggagcgggtggtgctgggtcctgtctcacaatgaacacttgtgctgcaatccttgtaggcaggagaggggatagggagggaggggcagaatctaggcctcctgcacaagggatctgggctctccgaggaagccttggaaaagcctgctagattttgctggcagaaggttgatggttcaggcctaaagccctccttttcctcccgtaaagcagacactgggcctggccaggtggtttctccttttcttttttctgtctctctcttttgaatccagtttagagcttctgattttagtgcatagggagatgccagatggaagtgggccctgccttctacagagaaatgctccatctaaatcatgccagagcagcctgccaaggaaaaatctagcagattgtctgcttggcagtatgcagctaagtgtgcgtgcacatgcacacgcagacacacacatcatgtagatatattacttttctgtaaaaaaaaatgttgtcttactgatatgtgggagctaaaaaagtggattggatgaagatagattggtggttaccagagactgggaaagaaggggaggaggtgatgggggagaaaaagaatatgaatgtgtttattaccactgaactgtacacttaaaactggtaaagatggtaaattatacattttttcatgttatatacagaataggattatagcctgtgttcatttgctagggttgccataataaagtaccacagactgggtggcttaaaaaatagaaatttattttataacaattgagatgctgaaagtcctgggtcaagctgtgcacatggctggtttcttctgaggcctctctccttggcttgtagatgcagccttctgtgcgcgtctgtgtcctaatctcttcttaggaggacaccagtcatactggattaagaaccaccttaatgacttcacattaccttcatcagctcttttaaaaccttggcccaaagtgcagccatattcggaagtgttaggggttaggacttcaacatatgaattcgaggggggcacaggtcagcccatgacgaggcgccagtggattttttattatttttggctctaaataaacgtcatcccttaaatgcaatggtaacgtgattatattcaaaatataaccaattcattctgcaactattcattgagcccctactatgtttgaggtgccaaggattacaaagttcaatgcatcacagtttttgccctcaaggagttcaggtgggaaggtgtgcatttcgttcagtggctgccctacctcatgacgagtgctctgaagaggtaggaacaaagtgctcagtagtgtggggaatctgggaagaccacctggaagaggcatcagttgcagtgggttctgatgagtaaacaggagttggctaggtgaagaaggagaatgaggaccaggtggagagagagtggttttggcggaaagcttaggacccagcaccacagttcagggaactacatgaacataaggcttttctgccttatgactgcaaggaagaccacgtgaaagatggtcagggaggtaacgaacacttccaggaatacatacaaggatattcaaaatcaagcgccagtgacacctttctgagaattgcattagaaaataagtaaaggaatttacttgcatgtgtttgttctcaagatgccaaattaaaccatagcactttaagggtggtaatgacctgaaaggtatcttctgttccagctcctcccttacctcacagaggtagagacagaagcatagactgtgaagtgacctgcccagggtcacacaactgagcagagccaagaacttgtggcagagtcccagtgggcctctcctagaggtgctgccatttccagccttataacatgatttgtcaacacctttgctctgggaaatggtttgtttttggaacttaacacaaaccactcaaatgctaccatgcacaaccttttctgtaagttaattatattttgaccctaaaacaatattcagagagtttttagaagtagttttttgttttttaagtgcttaagtggaaactctggtatcccacaggagaaagcttaaccataacataatttactataaaaagagattcacaaacacctgcttaccaccttgagggttcaacattttcacttttagagcactcctctctggcttctgcttccctggccctgcagacaccctgctgttctttgccctaatcacacattattgagctgagagctcctctaacattttcttaaagccttcattcagtgtgtctcgtatcttaagagtaatgagttttctgtttgaattagttgtttttgtgtttgtcttatttacatctgaagaattttatgtcctaattctttgttttagtcttctgaatttatgaatattcaccattcctgtaccatttgtgatttccaaaactttgatctcatccccttagggtttttaatatttttagaccaaaattattaatttattctgaccttaatattttttgctcttgttgcccaggctggagtgctgtgacgcaatctgggctcactgcgacctccacctcctgggttcaagcgattctcctgctttagcctcccaagtagctgagattacagtcatgcgctaccacgcccagctaattttatatttttaatagagacagggtttcaccatgttggccaggctggtctcgaactcctgacctcaggtgacccacccaccttggcctcctaaagtgctgggattacaggcgtgagccaccgcgcccagccaagggaacctttcttgaagtgtcatgacgaggcacacaccagtgttgtaggagcacctgggccctggattcataacagccagatagtgctttcagtgccaattaaagtgttctactcaaggatagctacacatgcatgttgtgtattaagctgatgctttcagtgtacaatttatgtcattcttggtggtagtcgagtgagtccattcaatgcatatttacatggagggacatggcacagcgttatgcttacttccagtgctgcactcctgctgaaggtggaagtggccatgttcttgtccccagccaaccaaactgtacattgttacatttactgaggaagggtgtgaatcagaaccccttcgaactagcatctaaaataagtaatttccttactacagcggatggacctgcaaagtatggatggattgtgtatgactgtgccagactctagtttcataggtgacatgtacttggagggtacaagtgatatttgagaaaaatgtaaagcagacatcatcaaggtctgtggaggagtcctctcctcactctctgcccctatggtcaacagtttgttggtgtttcttttccaccatgtatatttagcagctgtaatttcagcagactgcttttgcatttcctttcctcccacatggagtgaagcacattgctggcattccacaggtatactggaagaaaggaggttggaaaacctagcatagggtaggatgaatatatgcccttagacattgcttgtttaacctccaaccattttctagctaaattgaaaaagaaaagaactgtttttgaaagtgaaagaaggagggtgtggctcatagtctgaatggactgtttggacttccccttaaccaaatttgtaaacactatacatatgtgataggtagaatgctagtatgcattctaccagtatgctagtatgcattcaccctcaagtgttttgaacagttgtttgtaatgtgcaaagcattgaggaaaaatgcaaatggagttgagagtgaacccttaaccttgaagctcacctagtcactggagaaagaaaacgttcagcttggaacatttagagcagtgtgcaggaaggtgcatatgtgagcttcaagaatcatagatttatgtggggatacagttggaactttacctgggccttgcaggataccacaatctagggataggagaatgagtaccaggcagaggaaatagctcaggcccaggtaaggccgctggggcagagttcaggctggatagattgagattagaggggaaagagtgaaaaacaagattagctcagaaacaaagatgagattatggggagctgtgaagccaagcagcagatgaactggtagagacctagagaggtacagtaggttctttagtaggagtggcgagatgacagagagtataaagattagcagagtggcttggaaacttttatatcaataagtctgcttatcccctgaagtataaatagcctgtggaacagattcaccagacattttaaattttgatttatttatttgtttagctctctaactgcaataatatgaaatgacattttatggtgatgctgatgaagatctggcattgggaggataaggtgggattgaggatgaggatggagagcattatgaatgagtaagggagattattcagacagaaccattcattcaaccctgcagttccacgtctagatatctgctgaagagaaatgaaagatgtatccatgtaaagacctaaatgcaaatgtgcacagtagctttattcataataatcaaaaactagaaacaacccaaatgaccatcagctggtaaatggatacacaaattgtggtaactccacacaatagaatgctacttagtaataaaatggaacaaagtagtgagtcatgcaacagcatggttggatctcaaaagcattctatgaactgaaagaagttagacacaaaagactacataccatttgggtccatatcctgtatatgacattatagaaaaagaaaaactacagagcgcagagcagccccgtggttgcccaggactggaggtggggatggggacaacagatgtactttctcttcttgactgtggtgatggttacagttatattcacttgtcaagactcaccaaactgtagacttttaaagtctgaattttatggtatgtaaattatgcctcaataaacctgactgaaacaaaacagagcacagtaaggtcagacttgagtgggggaagaaaggccacctagatattgagcgtgagatcatagaagaaggagcttttgagagaggcagtagagtagagggcttggtttaccagggaaggtgcaaggttagccttgggatgtcatatgcttagggctgtgggttcagtggctatgacagagacctgaagtaacagtgagttaaacaggaaagtaaaagtttatttctttttacttgaaaccccaagctcataagaggcttctgttccacagttatgagaggcctccatcttgtttgccccctggagtgctgctcctccttttgatctaactgggttcaccaccacatccatgctggagccagtagggaggggaagatgcacctttccttttaaggatatgacccagaagttgcactgccacatcactaccactgctatcgcattggccagagttagccatgacggtacctagctgcaagggatgctggtaaatgtagtctttactttgggtatccatgaacctagttaaaagttgaggttctattaccatgagagggaagagagaacagatactgggaagtcaccagccattgtttcacaaagggctgaggcatagccaaacacatttccagttggcaggtgaaggttcagcctgggacagggaagcgaacagacagaactaaagaaatagatttgtgagtaccaatctgctgaaaccataagcctaagcttttctctggggaaaaggactgtgttgatctgagtcaacagataggagtagtcatgcttgagacttattggggcaatgactacaagggaaaatgggaaggcgctcaggagacagtgggagagccatcagagggcagcacatgtgtgacccaaggttaagaagagagagaaggaaggaagcgtcttgggccacagtggaattctaagtaagagaggtgagcaaggcattggagaggcctcaagcctcctcctcagtcatcagtggagtcccacatcccccagcaacaagcctgctgcagcttcctttccaccctcagtcactggcagggagcagccatgtgaggcatggaggcacgggtggccttggtacaaatgcagctgtagattccacagcatagtggtggggccaggagttaattatgttccctgcaactgaagatgtgaggtgccattctcattgtgtcagcagggcagagagtgaggtaaacatgcagattatagagagaagactgatctttgggaatgaaaatgatgaagaggtaggaagaatggagtttgtaggctgggcgcaatggttcacatctgtaatcccagcactttggaggcctaggtaggagaatcgcttgagcccaggaattccagaccagcctgagcaacatagtgagacgtcatctctgcaaatgtgaacaaaattagctgggcatggtgacacatgcctgttatcccggctactcaggagactgaggtgagacgattgcttgagccctggaggatgaggctacagtgagctgtgattgtgccagtgcactccagcctgggcgacagagtgagaccttgtctcaaaaaaaaacaaaaaacaaaaacaaaaacaaaaccaagttgtagaagaaaataggagaaagaggaaataacatagggatcttgataaaggggagtaaccagaatgcagggaaatgtcattggtaaatttcttctcagccccattacttttgttgtttgctaagccacaaagagaaagtttcttaattaaaagtcttatttacgtcggaaagcagtaaaatagcccatagagaagaggcctctaaaccacaccagagagtggaagaacacagtgcagaacaaagaagtgaacatttgaagaccattccgaagtcctcacccatgaagcaatgattgggcagcacagctgtgggagagcagatgacctgtagggcggggagtagcccatcctgggtctctacgaagacctggctgttaaccgcagcgtccacaggggcctccacagccaggctgagtgtgggtcttcagggagatcccgttcattcgaggagtcagttggtaggcgctgagcagccagcgggcagcacataagtgtggctcgcagaggatgggggcatggcatcccgcatgtggctagagaggctgatcttgtgaggacaggtgctgggctggctgaccccacacaggcagcacctgtcaggtggtgccaggacagaaagggatgctgcagtgcagcgcagcacacggcaagagatcctccagcaggacgtggcagggagttgaggttggtttggctgagaagtcccttagtgtctcagcgtcctcttctccaagcctctatcaggtactcactacctgagcatcatcttagattttcctcttctgtttcagtttatagtaatctccataaaaacattctattgcttaggtcttcattaccttgaaatgtgtatgatacctcgtaaaaagactttagtttgttttattgacaattaggactcttaacaacagctatttgccactgcagggagaacttcatttcagccttcacaggcatgagttgtcattgcctagtcactgaacagcactaatgatgggttggtatgtaaattatccatcattcttctccatgtattctttctttttaatacaaacattttactatattttctaataagtgcagaagtagagggattagcctccccacttgtcaatgttctactgcccttgcttgatacatacccaccctcacatttttaccttgtagtattttaagccgttcccagctattttctcactccatcttagacacttttagcatgtcatctctaacagataagcctttaaaaaagatataactaccaacatcacaccacacaaaattagcaaaacgtctttattatcatctaacacccagtctatattcagttttccccaggtgtctcaaaaatgtcatcctatagttgggtttgtctgcttccggatctaaacaaagttcacaccttgcatttagttgctgtgtttctgaggtttctttgattcttaaactgttctcttttcatctgtttggactttttttttttttttggcaacatatttgttgaagaaagtgggtcatttgtccagcagaattccccacagtttagatttggctgatggtagcctcaccgtgttacatacgtggttctctgccccgtgttccctgtgaacttgtggttggatctagagacttaatttgattcaggtttgattttttttctggcaaggatacctcatagctgttactattgcatcacatcaggaggcatatatacccagctgttctacttttagttataataatgttgattaataggtttacatggtgcccactcaacctgtccatgatagagttctccatctacttttcctggttttagcagccattgactcagccccattgtgaaggccacaagcatttcttgggatacctctttttcaggagtggccagcttgggtagttagcagtcatgccgggggttagagttggccttgcctgcggtcttggaaattggtcatctattgatgctgtcatctcaggatatagagttattggtggcacatatgcaacaaaatccctttggaatttcacattttgccattctgttttttaaagttggtgagcttcacatttttgttactgatcctttcctcattggattcttgactctatgtaaggttataaacatttcctcgttattggtttgagaattgaaattgttataaagctggtatttcaaatattcctaataggttctggcatttaatgcataatataatgcctgctgtcatgtcagaaatgtctaggttgcagttcccagttttagaaaatactatttgtttgatattgggacattggtttggctgctcaaaaacaggccataataatagtggtttaaattcgacagaaggttcatttctctcttggacaatcatgagttggtaggcagtttggagaacagggcagctagttccccaagatcattcagtgactcaagctcctccaatccagttatccagcctgcgatgttcacctcatccacgtggctgagaagctggctcactgccacagcacagtccaggcagtggcacaggaaggaacaagggaggccagcggctccttttaggagcatggcctaaacaaggcacgcatcccttccataatttggtcatgtggctcatacctagtggtaagttagactggaaaatatagtctggctgggcagccatgtgtccctgtaaaaccattactcttcagttactaaaaggaggaagacaaggacagttttattaaaggtcagttagtactttttagtgagctctctaagcctcagttttcctgtctgtaaaatggggatgaaaatacccccctcttgtggctgttagaattaaatgcatgaatggatcaatgtaatggagcatccttcctacttcaggctctcagtaaattattctgtttatagacacaggggaagtgcagcttcatgtaacagaaaatgcccaagttttggattctgtggtagacctgggtctgaatcgttgttgttagttgtgtgactgaggacacatgtacctaacctctctgaccctttaacaaatgaggattaaacttataggggtattacaagaattgaatgaaaaagtacatacaaatatgtagtgcagtgtctgacatgtagaagatatacataagtgttagctaattgctaagtaatctgagtgtaattttgtaggttcctgttggggaaagattactgtgtaaagttgattgtgagaagactgctgccaagcagttttaactaatcatgcacggtcatcaaaatccgtattttcagtttgaatatttggagcttaaatgtaagccagtgctttctaaagagatctctgagaggtacaggcatcagaatcatcaaagatgctcagtaaaaatgcaggttcttgccccttctccctgcacccgctgccaggctcctgaatcagaatctttgggaatggatgcagaagctccacctttttacaaacactttttaggtgatctttattacgctgaagtttgaggttccagttttaatccacagcacttatttgaagtatttgaacactttcacagtactttgaaagaaggagggttaattcattttttccaatttcagataaacaagactaggactctgaggttttatggggttttttgagactgggccttgctttgtcaccctggctggagtacagtggctgatcttggctcactgcagcctcagactgctgggctccagcaatcctaccacctcagcctcctgagtaactgggactacaggtgcataccaccacacccacctaattattgtacagatggaatcttgctatgttgcctgggctggtcttaaacccctgggctcaagtgatcctcccaacttggcttcccaaagtgctggggttacaagtgtgagccacagcacccagctagaaactctgggttttttaagatggactcagggatgagatattttttcctcccaaatgattgcaacttaataaataataaatgtttgctctgaattctttttagttgctgcgaaaccagagatttcctgcatcctatcatcatgcagtggaaaccgttgtaaatatgctgatgccacacatcactcagaagtttcgagataatccagaggcatctaagaacgcgaatcatagccttgctgtcttcatcaaggtggggacctccagggaagaggatatcagttatgggacaaagatgtgctttttaccagctgtctagcagggtgactagaatagagtaggtgctctggcaatgttgatggcatgttttttatgtcagtggataaacttattagcaataaatgctgctttgaatccaaatttccgaaatgtttggacctgaaataacttttttgcttgttttcctccacagagatgtttcaccttcatggacaggggctttgtcttcaagcagatcaacaactacattagctgttttgctcctggagacccaaaggtagtgcgggggttgttactggtaacagaagtcaccatgtagcctttctctggtagaattatctttttccttttttttttttaaagctctgccttactaatttttttattgtattgagcctgtgtctgtaattataagctacctgaagtccttcattgaagtaggaggagccctaaaaatcaattgaagacattgtttattgaaatgtgtccttagttttcaaatcaatccctgcagccatcctgaaatctgtacagtgcaatagagtgtgcagttctaagaaggtcaagaagctaatgactatttctagcatactattgctaataggttttttagaatcctgtataaaatatccagtgaggtatttatgactacacacttcttcctgcagaccctctttgaatacaagtttgaatttctccgtgtagtgtgcaaccatgaacattatattccgttgaacttaccaatgccatttggaaaaggcaggattcaaagataccaaggtaatccatctttatttctattaaccttttcacaaacagagacatttattttcaataagaaaagataattgattcaaacatgatatttgaattttctgatttttttcattgatgaattaatttttttcttatgaaatttccatttcaaaaagtattggtaaaatatgggaacttacttttcagcaaacttatcagactacagatcatgccagtatggctatttcattgaaaaatccctttgcttaaagaaaaggaatctatttcagttgctatagcttatttttatttgtttcacttttccttttttcttatgaattagcttttctttcaccaactgtggagtcaaatgacactcctgtaggtaggtgtggggtatgacgcttgctttcttgcattttcctcctctaaaaaataaagaatgcaagtgatggctgaactgcttccatatgctgttctgttaagtatttcctatataatttgatcaatttttaaacttgccataaattagtgaattttttcactggaactaagacattgctgtaacatcccagggaggcatccggttttttgctcctgaagtcactgggtactctaggatgtttctttaagaagtaaaacaaacatccctgcttcacccccaaaattcattattctactattttcatagcccttgtccatagtggtggcagtaatcaaaatcacaagcaatgtggcttttttacatgcttttaatgtttgtatgttgagtctttattaatgtcctgtattctttttacgtttgaagagagttgagctcatagggatgtctttgtcttcactgagtaaatcaaattgaacaaattagtctgtcaggtctgtcaagcaatagctcttgagcttaattccttgtatgtactcaggtattttgtgctaagggagagaaaaagtggaaggatgccaccaaactgctaatggcacctgaatcaactgcttctgaattccgagagaaacacactaaggcattcattcagtctgtttcccccaaacagactggtactgccttttaaggatcaggcagggggactgtggccctggagttggcattcatgcattcaacaaatatttaccccgcaccaactgtgtcgagcttcagaataagttgtgtacaacctggatgacaatccccggctattctacatacacctggatgacaatccccggctattctacatacacaagatacatagaatgtcagacactgatgcatcctaaggagaacaaacaaagcaaggaaaggggatatgaaaaggggtgacatttgagacagggtggccagataacagttggaagaaagtgaggggtgagccaagcacccgcatatctgggggagactttttctgggctgagagaacagataggtattcagtgtcccctgatctaaccctggccccccacctctgtggtctcacacccccctattctgcacattccaggcatccctgccaactcccagctcctcaaacatatcatgccacccctccacctcaaatagccccctccctggggaatcctcatcttcctccccaagccagccactccacacctcctgcatggggcctcccagggtctcctcactctcttccacttcctcaactggaattaaccactctttcctgccctgtgcccccaacctcaccacagcctccctcagcccagtctcctgtacctggggactctccttccttccacctggtacagagcccagggagctctttttgcccagtggctgtgtagtgaatgtgtgctgatgcccatctccccatgacccagcagggcagcacaagctcttatagacttctagggtatttggtagcaagacgggcttcgctcagtcgatggggggatatatgggagtaatttgccttactacactgacaggaataaatgttttttagaattttcattttctttcttctcacttacctcccacccctgccttcacctcctttcttgtgttagtctattcgtgtgctataaaggaatacatgagactgggtaatttataaagaaaagagggccagtgcagtggctcgcacttacaatcccagcactttgggaggctgaactgggaggatcacttgagcctaggagttcgagatcatcctgggaagcataacaaaaccctgtctctacaaaaaaacagaaacaaaaattagcctgatgtgttggtacacatctgtagcctcagctacatgggaggctgaggtgggaggatgacttaagcccaggaggcagagattgcagtgaaatctgcaatctaggcagattatgccacggcactccagcctgagcaacagagcaagaccctctctcaaaaaaaataagaaaagacatttattttggctcacagttttgcagtttgtacaagaagcatggcgccaacattggcttctggtgaggcctcaggaagcttccaatcatggtggagggcaaggggggagccagcatgtcacatggcgagagagggagcaagagacgaggagtgaggcgccacactctcgtaaacaaccagatctcgcatgaactcaaagcgagaactcactcattatggcaaggagggcaccaagccattcatgagggattcgcccccatgacccaaacacctcccaccaggccccacctccaacactggggatcacatttcaacatgagattcagaggggacacacatccagaccatgtaatttctcatgcacattcatacacacaaccatagatgtgtgagcacactcccagttaaaccataagtagtttcttccaagagacatgtgaactcaagctatgacttatagttttgataaactaggtgaaataatcataaacaatgaacataatctagaaaatgaatactctcccccttctattaaagggtttcatagaacttgggcccatattttggctagatttaggagtaactgtctgataggggacaaaaggcaaagggagaggtctatagactttcctttaataatggagtcagtctgacaattcacaacctagcttcagcttcctgaaattgtattttatcttcagagtgatgtttagctgtttttatgtacccttcctaagtagagttcatgtttgctcctatctgttttccagaagagctctcagttttgtcatttagcttgctggtgatttaccagtttggtttgatgctttgtccacttcaattttagtttatattaaatttgtatttgttttcagaggtggagaaatattaggagaatagcttaggaaatactgcattaaataagttcttcattcagggatagcagaataagtaggttatatattaatttgtttatcttaaatccactgggttttaatggagtatatagacattaatgaccaggaaaggaatatatgaactcatgtaataacattttaatgagccatgtatgtttattatttaattacatgtttgttatgcacaaactgctcttatacagttctgttagctagtataataacgtttttaactttgtcaataacaaacttatatttgtaatataacatatgctgtgttctagtctaaaaattggtacttaaactgttcactaatttaattatgtaggatgcaatatgttccaaaatccagtgcacttaattgtatttaaatttggttttcatttaagatcctcctgtgctaagaagtagagcagccttgtagaattgattctttctcatttgaagccaagtctgatcatctcttgacacccagggtgggctgaatgcagaggatgggtcttagttttttttgtttgtttgtttgtttgttttattcaaagagcattgcatctttcctaactcaagtagtttctatcctcatttcagacctccagcttgactactcattaacagatgagttctgcagaaaccacttcttggtgggactgttactgagggaggtggggacagccctccaggagttccgggaggtccgtctgatcgccatcagtgtgctcaagaacctgctgataaagcattcttttgatgacagatatgcttcaagggtgagtggtccccaatggaaggaatgtgcattgataatgtcctttattttaagtggtgtaaagaaagtaatcagttagaaaattcatggtaacagcactaagattttgctctattttgggactaaaatcaaatatctgtctttataggaaggatccaaataaaggagatggtcagcaccaacttagttcggttctcagaatcctgggtcaaacttaccatgtgtgtcttcttttcagagccatcaggcaaggatagccaccctctacctgcctctgtttggtctgctgattgaaaacgtccagcggatcaatgtgagggatgtgtcacccttccctgtgaacgcgggcatggtacgtaagcatggtcacattaactcagcctatatcaggtcccggggaagccaggacaaagcgccataagctgggtggcttagagcagcagcagtttattctctcccagtcaggagtccagaagtccaaaatcaaggtgtcagtggggttggttcctactggaggctcatgggccatgctcctctcacagctgctgatgctgcaggcaacttttggtgctctctggcttgtagtggcatcgcgccagtctctgcctctatcctcacttggtgttcgttctccatggtgtttgtgcctctgtgtccctctcttcatttttttttttttccccaagataagtcttgctctgttgcccaggctggagtgcagtggcacaatctgggctcactgcaacctccacctcccaggttcaagcaattctcctgcctgagcctcccaactagctgggactacaggtacccaccaccacatccggccaatttttttgtatttttagtagaggcagggtttcaccatgttggccaggctggtcttgaactctggaactctccatctgcccaccttggcctcccaaagttctgggattacagacgtgagccaccgtgcccagtcccctctcttcttcttataaggacgctagtgattgggtttagggttcacccagtataacctcatcttaacttacatcttagatatataatggaaagatcctatttccaaataagggtacattctgaagtccaggtagacatgaatttattgcgggacactattcaacccagtacacacacccctttattttgccagtgcaactcctggtaagttgcatttctggctaagatggggtcagtcactacaccttcatttcttgttaaaaaataagtatgaaaaccatgttctcgtgatgaaccaatgtcttgtgaggcctcagaattttcatttgtatattcactaaaaatttatggggggaaggagacacaaaaaaggtgtagttctaacctaacctgtgtcctggaagaggtcatggtagccccagttataacagtaacgtgctgcacagtctaagaaaggccacctctgtgggctacagtttctctccctctgtcagattagaagtgagactggacatcagggatgccaaggtgagggacatgaggctccacctccaagaactgactgccttaatttatattatctttgtgctgttttttaaacatgcattggaaattgagtagatagagagatgaccccagaaattatctcaaaagtttttgattagagatggttttgctcttttttactcagtctctggtacctttcatatgattgttttttaaaaaggattcttggaatcatcttgcaattcagctttttcaaaggtttatcactatcaaatttcttgtcacatttcagttgcaaaaggctttttaaaggttaacctataataatttctaattagtaaagtttataagagttttacatctaaaacctgcactccttctctttctgatgctctcttcttggcctcagagggcttatctgctatgaatttcagcagatgttatttcagcatttcccctttccctggtactttggactcatgaactggcttggttgttcatcttcctaccttgtcattatgggtgtacacttgcagagtctcatgtatgtttctgtccctccgtcccaccccaacagtgatgcagtgtcccatttttacactacctcttcacctccaattacattcctaagtaacattacactgagctgagccgtgtgtatagcgtttgtgcatgtgtggctgctctaaagggcatgaactctctctatcctaagtgcacctcgcttatctcaccctgtacaacattacatttcacacttgtattctctagccctgtctgtttttcaaaccagagtaattcagagtagaatgtgacctccttgaactgtttcaatcctaacaaaaatgaacactttcaccaaagtaaaatcccgttttttgacctaacttaaaaattaatatgatttctccactgactgagagttcacatgatgctacaaacatctacagtcattgctgctgttgtaattccccgcattacagataaaagccagcattccagttagaaagagcaggggaggctttctctgaaggaaaaaaacaaaacaaaacaataatctaaggaaatgttgggcgtccgagctctggaaagggaaaggtgttagcaacgctggggaaagagaaacaagactttatggaacgtgatttctctcccccacccccacccagcatccatatcccatgccccctgctccccctctgacccatcccaccctccaccctcacccacgcctcaaggctactcctcccatgcaggcaggcacgttgaatgcatcaggctgtcttggtcctgcacttgccctggcacttccaagaacaggggaggaatcctttccagtcatctttgattgtttctgctttcctctccttgacagactgtgaaggatgaatccctggctctaccagctgtgaatccgctggtgacgccgcagaagggaagcaccctggacaacagcctgcacaaggacctgctgggcgccatctccggcattggtaacgctccatgctcttgtgggcttctctccaccatcactctgaaagtgtcttggagccaatagttggtgaacgtgtcacacttgtgtggtaggaccttgaagtctaagttgctttcctgagtattcttttcctgcttgtgatagtcaacaactgaaacccctcagccatgccctgaaataaaggtcccggatgcctgtgactcctcaggatcatacagttaatcactggctcacgctgtttgctttttgttcaacgtttgttgagttttcattttaaatcttaattggattgtgtatactgttaagggatatttttgcaggtggtggggggaggggaacactgatttgtagtgttagcaattttgatgaaatatgacatagtaattccagaagaacgtagcagtttgtggctagaattcagtgctaaaatcagttctcaaaagtcttctgtcccgcaagactttttctgtgtgaaataacagaagagcggccacctctgagagaaaaacacgtgacacaaatcaagattctaatagtttctccataagaaaatgccggacataatgtacttattaatattctgactaaatgaacgcctgtgctagcttttcctcagagatagcagtttacatatatatatatatatatacacacacacacacacacacacacaaacacacatatcctccaagaattgtcacaggtgctcacagccttcttcagtctttatttctccctgtctttatcacattttgaataaagaaagcatcctactatggctagtggctagactacctaataatgggactaattcatgggataaaataaatggcagcctttatccaattaactcacaggacttgcccactctgagattatgtctttacctttgccggtggtggtggtggtaatacgccatttcatgtaggggatgaaactgggtagaatttaacatgagaaaccccacaccaatgcccaaatttatcctgcaataataataccagtccttaacctggttgatatttatgtgtctttttcacagttatgctctccttagttgacactgtaaagattaaaagagttaattcatgcaaaatgcttgcaacagagcctggcacacggtaaatgctcagcaaatgttggctgctgtcacgagtttccatttgcctttcttctgggccttcactctgtctctgccctgctttgccccattcccagccactgctccagaagcagggaggggaccttccttagagggttttgtctgcagtggttcacagcactagctttaaagtcagacagatgcagccttggatctggaatcgaccatttactagttaccatggcaggatgttgtctatcttctttgccctccatacccatgtcttcaaaacggtcgttagagggattaagagctgatacaaagtgtatggtggttggcagagaggagtcagatgagtggaaacatcacttcactgtaaccttgatcatttccacaaagttttaatacttctgtttgactcttttgactcttctccaattcagaattcaccttgttaggattggggacttctttagaacttggagataggccactggggatctttagcatcatagcctccaattgctccgcactgacattgcagctgtgaaaagtacttgaaactgacttaatcctttttcactcttgaattttaagatccaaatccacttttcataggaattcacctcgacaggcttattatactcaggttatctatattgcctcctttcttgaagatttaaatccctgttctcttttaggagtaccttccagggaagcctcatctttgaactgggtttactagtttttttctggcagctttaacaattctttgttcatcagggagtttctagctaattttagtcctggtgcttctccttcaagagcaaactctccttacatctctgttagaagaatcctgtttccacacatactgagaatgtgccgtcacagttttttaaatgtctttggatcatggtgcctgagagttttaaaagtgattcactgcctggataaaaactactctgagattacattcattttaaaaggcaagcgtcctgaggctcagggtttctttttccacctactcagtggtaccaagggaagagggacgaatttatcttcttttcattttactcaagtgtcgtttaaggactttaaaagctatgcactgggccaggatattaaatacaaacacatacacaaagacataaaaataggaacaaactaagcatattgattttgatatattgcatttccatctgtttgtcttaaattaggactctagttctggaatcaagcttgagactctgagaacttagggcctaattttactttactgaggacctctttctcttgagttctgtgttctttttcatgacttctgtgttcttcaaatgctgttctacattaaatatgaaatatgattatattagaaaaattataatttggtcatagcatgtgtttcttatctgagtacagaaaaaggccatagttttttcacagggtttttacctgtcccttgcgacaatcattcacatggtttctctcctggggagacgcagccactggctgacaataaggcttaatgaaaccatgttcaagcctttgcttcttttttcaaattctcctggctcttcttttcttgatctttaatacactgaatcagtttcagggatagcagtgaataaatctgagtgttcaacagagggaaggatttatgaccttgatgtcacaggtcttccttctaaggttaaagagttaaagactgaccaggcacggtggctcatgcctgtaatcccagcactttgggaggccgaggtgggcagatcacctgaggtcaggagttcgacaccagcctggccaacatggtgaaaacccgtctctactagaaatacaaaaaaattagccagggttggtggcagtcgcctgtaatcacagctacttgggaggctgaggcagaggagtcactttcaaatatacttttggtgtaacctagaggctggctatatttattttgttgtttatttattttttaacttagaagtatcccagtccatggcagctcatttgcctactgagatctgaaaacaaccagcctgttgtgaagtgccaagtaatggcatcttcagcttgcgtctgggagaatgtgtgctcacagctgccagacacagagtccaaatctcctgatgccatctgccaaaccagccaggcctttccgctggaggcacgccttttggttcagcacggaatgtacaagtccaaagagtcgttttaaattatgtgatttatttaaatcttatctaagcaggaagtcaatctattaccttaaaaaattccatagtaccaagatagggagtgatttctgccttcaaatactgtttttttcatggacatcacaaattttatttccacattagatttcctttctgctcatagttgtttatagcagattcccagatattccccgttcacagcacccttagtgtcactttatttcgtggcatccctaggctgaaagacacacccagcagttctctttattaggtacttaggaccaaataacttaataagtacttacatcctaacaatttagtaggcacttaaaagaaataatacacataaatttaaaggaaacaattaattttatttttaataaccacaactcactacaaatgggtggtgtgtacctgttggacactgacagcttctcagcctttgggtcagattggccagcaccattcgcatttcctgtccctcattgattacttgccttttatcatagcaggcccccaaatacccagcttcacaaatatgtcttcaaaaggagcatagcacaacctgctgctgaaacagcagcttctggctgaggtcacatatcactgtgttctcctcgaaaatttaaaataccccatgacacccctcagagttgggtaggctcctcagtgtttattaccagtttgaatgctacaagtttgttgtgtggtttaattttgtgatttgatagttgtaggtggatttatcttttaatttttttaagtcttcattctatcacattctgaaacaggtatgcatttagtctttagcgatcaaaggtggtttctaacaagtgaattgatgtttacatctgaatgtttcagactagtttctttttatctcattgtatatgacctggttctttaaaggtgaagtaatggaatgcaactcttgagccaacttcctaacagaaaaaataagtgcaataaaagcaatttcccttaaagttcagtactcatctttattttgttctgtcttaataaaactttattgttggcttgatttccatttagcttctccatatacaacctcaactccaaacatcaacagtgtgagaaatgctgattcgagaggatctctcataagcacagattcgggtaacagccttccagaaaggaatagtgagaagagcaattccctggataaggtaattgcttttcacccaacacaaatgtttcttataatcaatggatttagcccaaagtaaacgtacttcatgttctagtgccttttaagtgtgaccttttgtttttttctaaaccacccggctgacctggagtaggtgatgagagctttaaggttggggcccattccttgaagtgctctgattcctgtttccagtacctcagatcctgggcagggtttgcagtggagcgtcttgagtgaatggctctggtgggttgaacggggagggactcaaaatgctgcccatctcaatttcctgtagtctttttatttatttatttattttttgagacagagtctcgctctgtcgcccaggctggagtacagcggcacgatctcaattcactgcaacctccgcctcctgggttcaaacgactcctctgcctcagcctccccagcagctgggaccacaggcacaagccaccacgcccggctaatttttgtatttttagtagagatggggtttcaccatattggccaggctgggctcaaactcctgacctcgtcatccgcccgcctcggcctcccaaagtgctgggattacaggcgtgagccactacacctggccaattccctgtagtctttataccagagacaccatcatcaacacagctctccacccacaagggtgttaggtctgaagccagctccagagaataattgatcatataggtgattcaggggtaagaaatcactttattcacacagcacgcacccacaacacaacacttcctcctcatacttagccttttttcttgaaactactaagtgctcagaccatttggaactttgtaggaaaggataaagtgtgggtttaaacctggagccatggtagattggtatcactttgggcacagattttctaagttacttcaagttacaggcaagtgcccatcccaataaacagctgagccatttagggatttatccctagttctccaaaaacacccggaagacatccttcctcagcatcaggtttataatcttgtcacgcatcccatggctggcattgacatggttaccattaaatgcagttctgttgaggtgcgagcagctcagtttgggtgtgtcatgacgtattgaacttttcccttgaccccaacatgccttcatgtatagagggagaagctgctccgaaggcactctgcttgtgtcatacgcagtgctgaagaggaggaggagagctgccagtcagccaggaaaaaccgggtcactgtggatttttcccttctaatgattccacctttgccagaggagacattgaatgcaacaccttccctcccactgccggaagtactaagttctccagtggctctgatcaagtgggcaggccagagggtgcatccataccagttttgccactaatttcccctgtatttttttgtaaatgaaaatattcacatattttattaagcctgatatatatatgtatatatatacacacacacacacacgcataatttttttttcaattggccaccagcaccttgaataaaacatcttttttccactattgtttttgctttgatatttggtaaaaaaattttttttatttcaattggaaattcaactgggagagtttttaaatctcctgtgtttgcaatcacatgatgagattcttgttctgctttttttccacaagaacctgctgcctagtggcaaaattgccctcttgtttgccccaagctttctgacgtttgcagtgttgagctaagctgatgagggagtgacctcatcagtttaggacctctggccatgctgtgctgacgtgtccctgtttgtcccggttgggcacctgcctattgtgttccctgagcagtgcccacagcacgccccataatgcaccctgggtgatggcgcctgggctccaggttctggggtgctttggtcacagcagcaccacaggcacttgctgtttcagccacggctgttgtcctcaggaggtggttggttgtgcagtgtcttctgagtcatggtttctgttcttgatcctagcacacatactttcttgcatgaggtttcaatatacttggcatctcagaaggttttacttggcatagctaaagctgtgtttatccagtgagaaaggtctgtgccttctgcttgtccctcaggagagcgtgctgaggagacaagctagggcttccatgggcagcatctgagtgtgttatatttgggcgaaagggtgcctgtggtttaattgtcagcaagttacttgcaccttccaatgtgtatgatctgacttgattctaagagtctttctcttccaagggagaaaagggaaacacgttttcctcccgtaattaaatagaaaaatcacctgtattttctttttagcaccaacaaagtagcacattgggaaattccgtggttcgctgtgataaacttgaccagtctgagattaagagcctactgatgtgtttcctctacatcttaaagagcatgtctgatggtaggttaaaaaatggagatttctgttttgctcgtttcagcacttggtttgtttggttttaacttgtaataagttgaaatgatacaaagatttcaaaggattttcttgtttaaaatgcatattcattgactaaatgtaattgttaaaatgcaattcattgactaaggttcttagaaataagaaccttattgtgggaaaatcatttccttaattattttattctagaaaatgagttccaaaatgtgaatgggcctatttcttaaatttatattaaactgggacctgccatcttaactaaaggagatagaagcacataaataaaatagcttttggctttaaaaaaaatttttattcgtccagacaaacttactgtcaacttaaataactgtgttagtctctggaattagaatatatgttgtggggggacctaagcattccttccatttagagtgtgtatattcctggctcaaagtgggagatatgttattttagttttctaatggaaatggtagtatcatagtagattatgtttctgtttaagggtttgacaaccacattttaaaataagaatgagcagaactatgaatgctctatctggaccgtataaggcttgcaaatgtgtgtgacaggacagtttcaactctgttagctcatctgtgtatctggctatgtaatataaacaatcccagtaaacaatgtcgcagttcttatcctgggcaaaaatcttatttttcctacaacgaattaaaaggtgtgctgtgaacttcattaaggtgattgaattaggatgaactctcctaaaaacaaagtgccattttttgagaacctgaaggcctcttgtgctgcttatatctgggggcgggaggtgtgtactaaacatccagtggaaggtatttctgcttgaaaatagtatttcttttagatcaagcttccatttcagcagcattaacagcctggcttttttttttccccaaccccagccaaggtacagcctgactttttagctcagatggtaggaaaatccctcttgcccttaaaataaagactgggtaattcgttcttctgttgatttgttactttaaaatgctagtttttaaaaaagaacagacgagcaagagtttccctgaatgatgaccaaatacactagcacagggcacttagtctcatatttgggtttataaagttgaaattcttcccattaagtcaaaagttctaaactttgcttcatggtaataatgagtttcagcgagcattataattctgtttttcctttgtttaaagttttctttaaaaatattttaaatttcaaatattgaatatgacctataataagaacataactgctttttgaagacaaatatacaagaacatttgaattcaagtaaaagttattctttaaagtcatacacatatttttaaaatgcaaccacctcttcaaaacaattttagaatatatttttctctcaattttcttcaagttatcgattgttttccctttataattagaatttgtgtgtgtgtgcatcccatttaagaaatcttctcctactcccagggtcatgaaaatattctcatattttctttgaaagcagtgttatttaaattttcacattgaactctaaaaatctacctacaattggcttttgtgtgtcatatgggttagggggagaaattgcctccagagatggttaacacagagaaaaccaaaatcagttgtgtaactctgtagctactctttcatttattccacatttaatgagcaccttctacatgctgggcccctccttgctgtccttcttgtgccatttccctcttcacagagcttatctttgtcttcccactctccccaaccagtacctggggcccagagcagtgaatggcagcgtcattgcccatgccgctggccgcttcgtctggtgtgtgctgagggtggccacaggggtctgcagggtggtcccaccaggctctccagcatgcactgagctccccgggggctcaccataccctgatggccagcctcaagtagccagagtctgttcctctggaatctaaacttgaaacccctaaagatggaagcccatgacctacccttattactggtctaataggccaagcggcctttagaatcagatgcacgcgatttaaatccccactcagccatgattcttcagactggtaaatgggagaattactttacttctctgagcctctgttagctcatctgtaaatggggactttcttctgccccagattatggtgaggattagatggcacaatctatgtgaaattgtgagagcacgtagtacagtgcctggcacacaacagattctcagtctatatgccatgtcattcctgcctatcattgttcttggcaagtgtagagtgaaagcctgtggccatacatcttcatgagccatcagcatccccatagccaccgtctctgcttatctcaggccccaaagactctggctttttccctaagagaaacctctttacctatttctcaacctcagtgtaaaatataagaatgcaaaaaaggttagctattagatgatagaactcaaacgatggtaatactaaactgttaagggttcacacagaggtttaaatgcacataccattgggtacagctgtttcgcttcagagaacttatcctgtaggtatagttagacatgcatgcaaagacccacataaaaggatgttcattgaaacataattataatagcaaaaagttaggggagagaaacagtaactgcctatcagtaggagactagttaactcaattatggtctatccacatagaggaatattatgcaacttgggaaaacttgagatagatccaagctatattgttcagttaaaactcagagagcaaaattatgtgtgtaatatgcaaagattttcaacaaattccctgttggggagagatcctgtagtaggagacaagagagcccggctttaggttatatgtccacttgtattctttgaattttctagtctatttaagagcatgttacgaataagttaaatgagcattatgccagaatatagcactaaatgacgtatgatggaattaaagttcaaatgcagcatgttgaaggtgaataggcctcaggtgtgtgatacccagtgtagagtggtcagctataaaagagggcaggggaagggtttagaggcctacactccagggtttagaggcctacactccaaggttccttcccattttcacaacaggtgattctccataatgtatatcatatgtattgtgattctaagtaaatgtttattttctagatgctttgtttacatattggaacaaggcttcaacatctgaacttatggatttttttacaatatctgagtaagtagctttctctttgatcactgcctcttgattttttcctggatcattaagaggcttgaagaatactatgtagttgaaccagaggagtagtgtatgtcacatcctcacttactccttaagccctttctcatggtcttggccctaaaacatattttcagggcttgtgacccagtgatcagtggtcacccttaaagtattacagatacgtgcctgttttacatgagaggtaactgtttatgtgtataagtcatcttaataaaataacatgaaatttattagctgaattgggtagatactgcttttctaagttgaacctaacttaagctgatgcagaaactgagtcagaaaagttgctataattttaaaatataagaagtaaaagtgaaatcttatgtagcatctttatctcattttggtttgtcagtataagtttctgatttcctttaagctctttacttttagaaacgtgaatttacaatcccttatccaaaactgctggggccagatgattttccaaattcagaactttttggatttctgaaaaatttacatatagactgtatcccattacatcccagcagcatctctctataataaaaaaaaaaaaaagaatttctgcagaactattattgttcataataattgaataaatcataactaaaagtagctttatgtctattattttgggtcatattttggtgccaaatgtatttgcatgaactcaggaggaaagctggttttcagagtttcatgcattttggaactacagatgagagactgtgggcctggccctcagtggacgcttggctcatagtctcctgacctctgctgagttaaaggcgggagttatgtggtgaaacgagattcaacaccagaggagctcactagacattgttttaactacctcattaaatacatgattaaaaaaaaatgttgttagatatatatttttaaaaactacacacttggtgtgtataatccatatatttgagccaaaagagagagctccttatatagatgtaaatgaggatgaataagtaacttggaacagtgtgcatggtcttgaacatgttttctcgggcacactgccgtggagtgaatcactacctctgagtcgatggacgatcctgtcggtcgtgggcctctgcgctgtgttgctttagccagccaccaccacactgacagctacacaggatggggcttccctcacaggttaataaatttctctgggtttgaaggcactttccagaggactcccaaaaaccattctgaatgaatgaggatgtgacttatgctggtactagacataatgtttattgaatttgttattgttaacagataaataacgtcccgaaaataattttatctttgcatttccctaataatttttcatcttgcctgcagagtctgcctgcaccagttccagtacatggggaagcgatacatagccaggtactgtggggcgttttcattcgaaacgtgttgttttctgtgatgcctggctctgattgtgtgggattggtcatcagtggcggttggcagttggggttcatggaagcggccatggggactgatggcaggcccttggattgccaccgcagagcctggcagtgtctttggtctgcattcctaccggcgaagtctcatttcacctcacgtgttatctcttggaaagcattcctttagcgggctgtgtctacccttccatcctctcgtccaaactccccctccttctctgttctgtctccttcccatcctcttctccccagttcttcttcctatgttccttcctcagtggtttctcttcctctgtttgactttccaaggtcattttgactgttcctgctcccaactacaaagatactaaaatctcacctaaccactcttcttctttcttaatgaaagaatgttttcagtccatcccaaatttgtgtggacttccacaaaccttctctaaaatggagccttttctcttcctactcttgactagttggtaaacgctccatgttcttggccagaactccctggtgagtagcgtcactcccactttcctgtgcagaaccagcctcctagaaactccttgcagctgtgtggctggacacgccttctttgggggcgtttcttcgcagcacctcttgtccttaccaagttcttcctcctgccccactgccattcagattgtctgtttgtttttttctgtgttgtgagccattctgtgttattgtattagtggggtcttggtctaagtattatatttttttactgttgtttttaacagctttattataagtaaacatgttttaagaaaaacttaaaaatgtaattgtcattgaggtttgtttctctatatatcgacaattttgtcttatagtgatgaaataggccagagatttttagtagacttcctctttgtgaagattttctttttctgttaacattgttcttttctggggatatttgagaaattttcagaattacattttatgttaagaagtaaacatgtatgttttctttttaaaagaagcaaatttagaatttttgcattttcctcctattaatattttctatttttcattgaaatgtggtagcacttaaagttctctaatcttaactgttttattttttatcacaacagtaattttatatttgagttttggagtactaaatgcaagtatatacaaggtgtccttataccagcaacgtcttctaccttgacttggattctccctgactttgtcccatgaagatgggcaaacagtaaattctgtcacagaaaggcactgtgctgggctagcttcactttttgcagtgacacctacgtcacaagatggcatttggagaatattgtgccaagtagaataaaatgcctcacagcttaaaacagtgaatgtgagaagctgaagatttctgtcccaacaaaatgttttagaatcgggttttgtgaaatggttaacgtatttttttcagtggatataaatttaacttcttaaaagaaaatcttcctacttcataagcaccctgtatatatttgcatataaaagtgtggactgccttaaaaatagatgggccaaggaaaacaggagtggagatgatgtgactttgctccatgcactgtggaaagatatgctctgctctatacaaaaattgccatggttctctgctgcatgtgaaaaagatcctgaactagactgtgaaccttgtacatgtttgccatccacggtggtcgagtttgatgaacactgtgccttcttattgtcactttgaagtcacccagcagcatgcagtcgatgatagtccatgcatgtccctgttctcctacacacaataacacagtgagggggacggttggctccgggacaggggacaggtgtcattgcagccctggtctcattttcatctgctctggtgatggtacacagcaggaagttagctgtttgattgctaacccaaatcactcttctgttttctctacttgactgctgacaagtttaacaaagtgtgtggctcttctccttcctgcttgggtaagaataaaggtgttaaaactcatataatcccttcctttgcatgtttgttctctgtgtcttccaatgcattttttaattaaaaaaaatacatgtcttttgctttttcagaacatatataatccaaaaagattagtgacgttttgacagtcgtcagaacactaaccattagtactgcattggagtgatgctcacttttttcagagtagcatctctaaagtactttctaaaaataaaaaggtccctgctttggcctgatttttgcttctggatcatcaggtgctttgccgtgaagtgtgcaggagctgccgcctgtctgtgtctctggctgctccactgtgttcagtcagtgcatggccatctccctcgtgccatgttctggcttcactaacactccccgtctcgctgcagtgtaacacgtctaacttttgcttctatcccatttcactcatgttgcaggaaccaggaggggttgggacccatagttcatgatcgaaagtctcagacattgcctgtttcccgtaacagaacaggaatgatgcatgccagattgcagcagctgggcagcctggataactctctcacttttaaccacagtaagtcccatgacatgccatcgtaacagccagccatctcatgtgccatctcagaggggagagccctaggccacacctaccacatcaccaactcaatttttcttctagctcaaagcaagtaggatgaagagctcatggcacagttcccttccttggaggagcgtcctcagcatttgggagtgacacaatgtggaacgtgctcaactacagcactaaacctaaaagtgcctgaccctttctgcatccctaaaacaaaactcggctgggtccatagccagccgttctcaagaattctaaacataaaatttggattcatcacctagaaccgacttaatgttggctttcccctgcaactctgagaacattcgggatggatttctttcaccccttctgatcctgtgcatgtaattgatcaagcgtccacattctgacattccagctctgaatggatgttaatccttgcactactgtgaaaacataaagcccatgaatcaatttgtgagggtgtggaaaagcatccaataacaaagtgactttttctgtgttttcagtgtgagaaagatatcaagtgtgcttggaatttctgtagacaatggtaagatttaatcaggttgaagtctgctttatgaggttgcttcacttgcaagccaagaccctttttgttcatcttgccttcctaactttggggctttctaactttacaaaagagattctgccagaacaggggagcatatttttaatttacttttatcagtcagcagaggggacaaggcattgtgtgctgtttctagtaatttaagtgctttatcttcttaagggtttctcaaagcagaacacctgaaagatatcaaccatacagcacgtgaaaaattgatgagatcatttataatacccatttctgctagcattgtgttctctaaattgttccatctcttctccaagcatgacacagctagttattgttttatctcaacaattatttgttattccaagtgctgtctttaatacatggttattaatatccttccatcatgtctaataataaattccattcgctgtgatttttcacacctctttttaaaatacaggccaacagtaaaggcagtgttcccaatgcattgtattaataatagttcaaagtaagacacctgaggaaccaaaacaaagcagcttcccacacctctgacccagcaacgtgggcattatgaagattgtccgggtgcagtttaagtgttatgaagattggctgggcatggtggctcatgcctgtaatcccaacactttgggaggccaagctgctggtggccaagcagcaggtggatcacttgagaccaggagttcgagaccagcctggccaacatggtgaaaccccgtctctactaaaaatacaaaaactagtcaggcttattggcacacacatgtaatcccagctactggggaggctgagacatgaaatcacttgaacctggggggctgaggttgcagtgagctaagactgtgccactgcactccagcctgggtgacagaacaagaccctatctcaaaaaaaaaataaaaaaaataaaaaatgttatgaagatagtctgtcttgataaaatcccaggcttaatttagataatgtcagtctgccacacggagttggtagccataaaatgctacttctgagttctacacttagctgtagaatgcaaattgagtgacacctttaaggctacagtacttgattttttaacatcttttctgttggggctttgactagttctgcagaaagggattggaacaaaaccaggagtttgttatttttagtttttctttgccatttagcagcagaaattcaatccccactgataaacagaacctgctggacctcctttgctcagataatttctataacacagaggttaactcactattggttgaaataaatgcttaaactttgaagcactttttaaaaaatcataagtacaccagtgctgcacctccaatgataatcatttaggaaacacagaaaacaaaaattaaatgaatggtccacatgtgaataaataaccttaatccactcggatatgcagcagctcttcccactgcaaatgggttttgtggtggtaacttgaattggaggagagagacagctggcctggtgctgctgctgctgccaaaagccatcttgttaacatggtttatttccattctgtcttcctgctacccacaagagccctgtcctcctgtctccctcctctttcatcagttttcagtggcatactgtcctcagtcacatttctcctgctttgccagtaaacagcatgtagctgattcttctagtcctcgcctgcattcctacaattcctgctcattccgaattggttctgttatctcctaagttgttgcaactcctagaactcagccttcttttacatctccaattctcattatgtgtttgaatggcttcagcttttccctccgctagctctttgagctccaaatcatcaactcagacaaaaaacacagagaagggagtgcatactgtatgtacatgaacatgtttgtgtgtgtgttttatatatatgtacatgtttgttttcatctctacctgggtattttttgggaaatttatggccatatgtctttaaaaaaaatcccatttaacaacaaatacaataccttctgttgggccaaccaatatgacatagatccaatatgtgagaaagttgccagggaaccccaggagtccaaaatgattttatttcagaagagaataaaaataggaagagtccctgtacatctgcattgttcatttccgctatttctgtagagtaggaaaggctttgtcagaactcagcttgaccagcagggagcagcagaggcccatgggaaacggaatcctttgtaggtctgtccccatcaccactggtaacaggacatggaagaaggcaccacacgcactgcacatggaactccagcaagaacctgtctttactctttaattttgataggaagtagaatagcaaatccccatgcccaaatcccgtgatggccaagtagtcttagctatttgaaaaacacccttaaaagacaggtttgttgtttaggccatcactcaggtgtatggaaaataaactttagaacacttaggccttgacatatttagtgtaatttgtgctcattgtgtatcagtggaagagatttgtgtcaaataaaaaattgagagtgatagcacaaaaccacaaagagagggtacactgtaggtacatgaacatgcatatgtgtatatatgtgcatgtctataaaccacattatgaggtgaaaacttagtgaaatgtgtttgaaaataagtggtgcatttgcaaaatatatataaaataacactatgtttactttgatgtcgtgttgttctaggaatacatcaagttcatttgcataattcatattttccactggtataatgcagggaacaccagccaagaggtagcagcatgaaaagaaaatctggatttcatataatttgatctaaaaggcagttaaagattactgggtcaagttgcagataatatttcagatcagaatcagaaagtattttctaactgaactggccttgagtggcatgtgctgagctgcctgtgaagttcatgtggacacctgcagctggagctgtgcaaacagactggaggaggcccagctggggtattgtccaggtcacttaagcatgccatgaggagttggatggcgtggcttgtcaggccccatttaactccgaaatgtctttgttacctaaagcacaagcaggaaaatgaatataggtgatcattaaattcctttactgtacatcatattgaattaatatgaaaaatacagagaatgtagacatctctgagttaaaatattttccaaaagttttaaagcatggataatatatctttaaaattggataaaatgtgcttggatgctttaaacatatactcaaaatagtaaataaatgtttgtggccaggcatggtggctcatgcctgtaatctcagcactttgggaggctgagacaggcagatcacttgaagtcaggagttcgaaaccagcctggacaacatggtgaaaccccgtctctactaaaaacaaataataataataataataatgcagaaaaatctgggcatggtggtgcatgcctgtaatcccagctactcaggaggttgaggcaggagaattgcttgaacccaggaggtggaggttacagtgagccgagatcatgccgctgcactccagcctgggtgacaaagcgagacttcgtctccaaaaaaaaaaaaaaaaaaaaaattttgttcataaacaagacacttatttccttgattctgagatatgtttccttgattctgaggcacatttttgcacactttctagtatttccaaagttgggtatatcttacacattacactggatatggtagtctgtcattgattggtatttcttgcaattgatggggtctcagaggtgagcaggtctgatacagtgtatgtttaaagtcagtcatttgtaatatccttacagaggattttaagatgtgtggtatgtttaaaccaagtattttcacttggggcctttacttcatatgaggtcccactttcagatgcaactcaacattaggtttaaaaaagacacagggaagagaaagctgatggtatgacgcctacctcctgaagcataaactcttagattacagcccgtgtctccacaaggcattctgagcatatttgttttttttgtctgtggatcaaagggcagatatcaaatgatataaattttaccttggggtatcactatttattctattctctactctttgccagtctgtgaggaaaacctctttagcaataaaaattggatggaaatgaataatagattgtgtagatattgatcagtttgatattttgcaaaaatgtttgaactcaataaaaccatatgccatgagttaataggtatctaggagactaggtcttctacatttggagagttctttcagcaagaaaattccttgttatttggtatttatattttctcataagacttactgtgtttctggattcatgttatgggctagaggggaaaaaagtcaaaatacgaacaagaattttggttgcataaagagtgaaggtggctatcaacatggaagtgccccctataggaatacgtctctgacctactcttctatcccaaatgtcctctggtattcagaaaaggcatgtggcctcaggcttctgtcctgcccaccacattacctctgatgtcatggtggtggggagggaggaggttcgccgatgtgtcagcattattcatttgaactatgcaggtaacgtgagtttgtagaacagggttaggttaattcagtgtagacaaatttcatctgtggccccagagtatttgaaagatttgggggctttagaataagtcttgtcagaatgacaacagaatgaaaattgtataaatttgagcagtgaatccgaaggaccgtaaagcatcccggggcatgtgtgtcagagatagcacgtccctgcagaagtcctgcagctctgtccctgaagagcctggctggagcgaatcagtgcagggccccaggcaccacggccccctagtggaaatcagtgtgcttcacaccgcactccttacttgcccgggtcaaaagctgcttaatcagctttcaaaacattgccaacccttagtttaaataatttctctgcctcttcttggatttactagctcagcttcattttcctgtgttggtctataccatggtgattgttgattcaagtcctcctcctgcacagctctgttccaggccttgagacagtctcagtctctgtgactggttcagcctctctatgctgccaattatttttagggatttaaaaaaatagctctagctcaggaatcctgctgattttttagatgaaacagttggaggaaaagcaaagcataacaatatgtggctaaaaggaccatttcttttagattcctgtatgactcaggcaagcgtaccgatgtctgtatgaatctgactctaaaggagagtagatggtgtaataacatttcccagtaccatgtttccatatgtgtatacataattatataataacttaattagcatagtccattgatggtatgttttaaaacagcacatggccaaattctaatttttaattgttgcaggctttcagccaggagtagttaaattctatgggagttcttcaggccatctcattggtaatcatcacctagatgcacttcacctgttggtgatctagaccaagaaaaggacagttctttgcagagaaaggaattaaaataaagccagttccttgttaaaattgaacccagacaaaaactcattcggggcaaatggcagccctcaggaaaggatcccttggacctgtatgatcattttggttggtctgataacaggtgttgtatttcttgtgtgtgccctcttaccacagtatgtgatcactttaacagtcatcatcgacctgtttgttttcctctttcattgtctctgtatcttaccaaacaacctcgctgaataaagtcatgccttggattaccatcatggcagtacaagtaacattagtaccccaacatatccacctttattttctctgggagatttcgtaccccaaaagcaaaaaatgaaatagaactagcatggtgcgagatgtgttacagatcctcactaaatttggagagacgttggctgtgctgcagagtggaagtgatgtgatccacaacaggatctcagcaccacctttgtaaaagcaaagcagcattggataaaagcacacaacagcatttctatcatattttaaaaagcacttctgtagcttttaaagctcttctgtagccttttaaaaaccactctataattctgacatttgagtcagaatgatgtcatgctagttacttgattttctcccaataatatgtactatgatacagtgacctggataaggaatttggagtgtagattctgtttttttcccattactggtctcaagaacattccctaggttttctgtacttcattttcttgatctatgtacaaaatgtcctcctctctggagtattaggaaaattacttaagtaatgaggcgtcgctttaattttgctccttggagaaagacattacatggtgttttattatattgccatctttctttgtaatctagatcaatactgtaacatctttgcatccctatatgtatttctgctaatgcataccatttcataatttaatctcaacttgtatgtcaaattgcatttatatcagtactaaactgattttgccacatatagaagatatccgtttgtatttaaattaggtgtgactaagctaagtttaaatgacagattcttcaagtccttttctttttctaaacatttctttcagacatgttggcttttatgctttttcttaaagcaagtagaatactatgcacagcgcagtcaactcttgattatcattcacgagcttgctgataacatagctcctgaagttattgacttaacacctccatagcgctcaatgtgtgccaggcactgttccaagagcttcacaaatattaacaaatttaatccttaccacaaccctttgaggtagatactgtattatccccattctacagatgaggcagctgaggttataaaggggccaaataacttgccaaggccacacagctggtgagtggcagagtgggactcagtgaccagcagcctgatctcaggctcattttcttaacctgcgttgtgctgctgcctccgtctacatgggaagctttggaaatcttagcctctgccagcactcctgctggatagcagaatcgatcaatgcctgtcttggtccaagtcctgtctccactgtttactacctgtatgactttagacaagtttagcctttctgtgccttcatttccttatctccaccaagggttcaacaatcttcatacttcacagggctgttgagggattaaatgagagaatatgtgtaaagttcatagaatcgtggctggtacacagcaagtgcataataaatgtttgctgtggttattgccctttcagagtgggaaaaaagttataattgtattgaaacattattactactttctcccttccttccccctcccaccccgccccccaccccaaaaaaaaggcaaacacagagacaaggtcccaaagtgggccttctgaataatcaaaagttgactgtgcctaccgcatcctgccagccttgccttctgaaccactgggcagtaatcttgtgttgtaattcatgcaggctatggccactcggacgcagatgttctgcaccagtcattacttgaagccaacattgctactgaggtttgcctgacagctctggacacgctttctctatttacattggcgtttaaggtttgtatcaatttgctgttcgtggttctagttttacctttcacattcattctgcttggtaagctcagtgagcacaaacttactatgttgcatttttacttcagcaattatttttgtccctgtaaggaaaccattaatctttaaattcctttaatgaaatcattccacagtgaatggcttgaatgccctgaaataaaatttaactggtcagtgtgtgctgcgcgcttgggtatggtggaaacacggtctctggaggcagttaactcttggctcgaaccttgaggatggtgaatataggcacctaatcaggcatttctgccttgaatatctttaaatatatccaaatgttatagcgtttaattagatttttatgtagaaaggagcaataaacacagacacatgttttcagttttttatctgttactgcattaaatgataaaaacgttttggagatagaaaatgaaaggggttttttttttgtcttgtttttaagttttagcaaataatattcaagtaggtggagatggactcttcagccactctcctgtttttaggaacccaatacttctcattcttgctaaatgattacttccatttctagcatagaaaggagaaattgaatgagtgtttatatgccataaatattggaacagtttgcttatttgcaagggtgtttgggaaataggacccaagtcattctctgctttacttgtctccactactcataaagcacattcctttattaggaagaataatgagagttttcctgacatcgtgtccctttattattatatacctttactctccttagccgccacccctctcttgtccccatgaaactcattactaggagcccagttgagagactgggaaatgagagcttaaagaaaatgagctcggggtagaagcgcctcattacctggagcctctactacaggggctctcagagtgtggtatccgggccagcagccactgcagccctgggagcatgtgagaaatggaaatccttgggccactccccagacccactggatcagaaactctgggtgtgagacctgaacatcacagtgcctctactagaaacatgaaagaagcttcggagcctctcttttcttttgggtatttttagttaaaaattcttagtaaataggcaaggaaggttttaaaagtgaatatctggccatgcacacctgtatcagtctcaaacatgaatcattaagttcagaacagcagcagcaacaccttcttcccctctcctcctgtgccccaccaggtaaataagcagaaaattctggagctgcagagcagtatcatggggtgagctacaggcacacggggcacaagtgcagtctgagtggcacctgtgagaacagtgacggtttccttactgaacaactgaacagcctgcagttctaattcagcccccttcaagttgcttgcttaatagtaaagaagaggggcctggtgaagtggctcacacctgtaatcccagcactttgggaggccaaggcaggcggatcacgaggtcaggagatcgagaccattctggccaacatggtgaaaccccatctctactaaaatgcaaaaaaatagccaggcatggtggcgtgcgcttgtagtcccagctacgggaggctaaggcaggggaatcgcttgaacccaggaggcggaggttgcagtgagccaagatctcgccactgcactccagcctggcaacagagcaagacttcgtctaaaaaaaaaaaaaaaaaaaaaaaaaagagttgtaaagaagagtatttgtcactattcctggatctctaaatatctggcctccagtctcagaatgggaaggtagtaggagttcagatgtgaattccaggttgacagtagcactgttacctgtgtttgctcctcactggtcctgtggcaaagggcctgatccctgagacacccaaggaagattgagcttctagagctaaggtgatctctgtgcaggtttatatgcctgcatgcaaaaaatgtttcctgtttaaagctcacctccccccagctgggaggtgggcgaatgtatggtgcactctctggcattactggatgctgggccatgtggtaagacaggcttccctggcttagactcacagatacgagaggtccattggcaccgcagccactgggatctttctttgcaaatatttactcaggcatcagttggaccatatcagaagagatataacagtgagtgagctgatataattcaagaaagtcatctttagcaggtgtagctctgtggttactgactctcttaattggccacatctaataaattgccaaagacaatccagaaatcaatctcctaataagataaaatgtttgaaaggtttaagctcagaattctggtattattattacatgagcttcctgctatgtattgagtgccttctgtgcctcaggcattaatcttcacaacagctctgcctggtagatcgaattatcccacattttacagatgaggaagtcgtggctgggagaaattaggaaatttgcccaagatcactacacaactgacctgtccaaaggtcttgttcaccactaagacagatgtgtgtgagtgtgtttgtgtgtgtgtgtgtgtatgagagagaaagatgaagtgagttgagtaaagatcaaggtatttgaatgatctcttatacagacagaagaagaaaattaccaaacacttagcaggtatcagatatatacaaatctggacatgttcacacatgttatctcacttagtacataaaagggtttgttttataaacaggttgtcacatgcagaaaaatctggtttttctaatgtctattattaacacaatcccaaaccaatgctggacttcaagtagtttataatatttttaatgtgttcacagatttaatctggaaatgtgtttttagcagttccatttttagtgcctcttcttgatttgaactgcacagtgaggactaacacataatcaggagcaataggaaccaagacagggaggagcacatgggcaccggaggcttgcgaggcagcttgtgatctgctttgcacaacaatgagcctggtcggcagacacatgaggcttaggtcgtcttagtgattggcaagcatctgtaacagaaatggctcttctgcaaactgattttttaacgttattttaaaataattgtgtacataaaactgtctgactgggaagagtttgccgtcttaaattaacttcgttccagttacctcattttgacacccgagatttgttttcctctgtgttcctggatcttttagaaactactgatactgagcattcattttctgaaaggctcatctcttggattaagcaccataagagaccatgttacaatggtcaaacctgaatccaagacagagaattcctagagaagcagtctccactgtattgctagaaataagccatgcctttatattattctaatatgtcatttactttcctaagtgaaaatttcccatcttcagcaagagtttatagggataaaaagatagaaataagaaaccctgccttgttatctgtggatatttctgagtggaacagttaagggtgatttgtgttttgctctttttgtcccctgtgaggctttctgaatgttcaaagatgtgtttgtatttagtgtatgttaccttctatgtgatgagaaggcagcagggagacacagaaaaagagggaagaaaagtgattggaaaataaaagcaagtagttaggaaaccggggtgtgtctgggacaaaaggtcctttacctgtttaagtggaggttatttacgtctttttaaaaataaattttattgtatatatttgaggtttacaacaggttatgggatacataatgtaaatgagctttaactccattcttgcaaacaagttttgagatcagggctgaagaggactgaatcctgaaaatgagaagtaaaggccatgaccatagagaggaaaaggaggagaaattgaactgaagtagagaaacatgggaaaggtggagaaacattagaaacatgggccagttcagacagcagaacttggaagcttgggaatttttgtagaaaccgtatctcctggatagcctcagcaaagagtgctaagaaatgaaagctcacctccagattcacccaaaccttaatccagtcataattaggaatgtaaattcattggaggaaagcaaggctttcaaactacagctcctgagaaaatggcattcatagataaaacttgtaagcagttccccaaacactggaaatcttttttttttttttttttggttgagaattagatcatggttgagaactaattctcatggttgagaattagatcatattcatttaattagtcccactttctgctcattaaattgctcccctttcacatgacggaattcaatatggtaccttagtatttcatgatagaaagatcactgtgaattccaggtgttctgccagctgtgatagattcacaattcactggacctaaaaaaaaacaaaaacttactccttgaggaaaaatttccctccaacaacaagacaaggtagatcttgctctgaaactatgaccgcaaccataatttgctatgtagcaaaattatatggacataagttacccctgttccgttggccaaattgtaagattggtttgagatactggcctcttgacatttttttttattaatgtcaaatctgcctacttgtgcagaatgcacacacctatcgttccccaacagagctttgttcagacagcttgtctgtattggaaggtggtggtgtgtcatttagtgttgtgcacattagacacgaagttcatcctggctgcttgctgggccacacctctagctgctgtgtatattctacagttgatgggagttgtagccaaccaggcttccaaagtgtttaatttgtgtgaattttctactgacatgaggaaatcttgaatgactagaagcaaattgtagtcttcttgttttctttgataagtaaaatccacgaatgtcaaaaccctactagatgccacctactgagctagaccaaagtatgcgtcagatggtttctacacttgatctcatgtcttcacagtcgctgttcaaggtcagttttagggtcatcattttacagatgaggatgctgagactcagtttacctgtgcaaattcatgcctatgataagtggtacctgaccaaagcctgtacactttccaccttaccaaactctctgattattcatagcttagcagagtgccttagaggcctggggagatcacttttcccttttcgaagacctgtttcatataccttacttgagtactttttcccatctataattatcgcatacctgtgatggcacttctctgttggaattaagatgtcacaaatggcacctctgtatcagctgctggtggacagtaaaaatgagtacatattaataaatagaagcccagtcagtactaagcaagtgttcctttcaactctgttagtttgctgggaggttcatccccaaaacataaatgtattgatagatttgcttgttctacaaaagaattctgtactttcctagaggattcaaggcagagtttgtttaaagtataagttgtcttaatacttagaaaatgtaattcttgagcctgaaattgtgtgaaacctactagaggtgactggtatgtctaacaaagccgtcaatgtgtgttttaagaaccagctcctggccgaccatggacataatcctctcatgaaaaaagtttttgatgtctacctgtgttttcttcaaaaacatcagtctgaaacggctttaaaaaatgtcttcactgccttaaggtccttaatttataaggtaagttgcttcatgggcagtggttagatgttttccttcttcccccggaattgaagggtacattaccgagcactgacctgtctgtggtttatctgctgcttcctctcatcctgtctagtttccctcaacattctatgaagggagagcggacatgtgtgcggctctgtgttacgagattctcaagtgctgtaactccaagctgagctccatcaggacggaggcctcccagctgctctacttcctgatgaggaacaactttgattacactggaaagaagtcctttgtccggacacatttgcaagtgcgtgtggtttagctttccaatacagatttactctgtagaatcctgctgtatcaggaaaactttgagtatcacattaaccaatttaccttgtcataaagatactgcaagatctggaaaactgggaagccacgtttgctggcttggtttatttcatgttccattactataagatatgggcctgagatgcgtttctgttggtaaattgacatttaaatattgaatcaatattggactgactaaaattccattgaatcaagaagtgttagaacctatgtgaggatgcttaatagtaaacattttaggtaaggaacaagaagcccaacctaagtggttcttttctgtcctctatctgctgacacatctgctatctctgcagaattaaagcatcctaaattctctgctctgagagccagccaagataatgaccaaacttgtgtatttttgtaaactctctttttctacaaacacatggtaggtgtcccttttccatctctgtatttaaccctttttttaaaaaacaatatttattgtccacataggattcgtggatacaaccatgaacaaaacaaccctctcccagccctcatggagtgtagtctaatggaggtcacagacaagctctggaactctgagagtacaagtgtgaccactgttattgtagaggaacttgagtgtatcaggaggggcacctagaggatgtgaaggatgcataggggctcatggttgaagatcagtgagcatgttccaggccacagtgaactacggggaagcacccatctggggaactagagatgttccttactgcggagtttagaatatgggtgagaaggagttgaggaggacccatggtggcatatccaaatcattgcatatttggacagatcttctggactcctgtgttgatgatgggtcaagggtagtctagacctcagctagggagaccattgtcaaagctaggtcagagaggatggtatcctagaccagggatggtgaggtaagaaggaagaggagattgagttgacaacatttggtgactgattgtaactgggtgtggtgaaggaaaaggaaaataaagatggcctccatgctttagctcaagcaactgggtaaaggcagtgctattcattgagccaaaaaaagacagagccccctgtggcatagttaatctatccatgttctgataaagtattgcaaaggacagtctacccatagcatatttaatacatttaagttcaaactgaaaactgagaaataaatcatgtctccctcttggttagagaaggtaataggtaagtaactatccaagtggatgggcttatctcattttctttctccctttgctctcctgatcagcattttgctttgcaaacagtgttttttaaggatagcagaatcactttctgtaattattcttaaaggggaagaaaatacctcagacattgtttcctacacggagcgacccctgctcaaagcaccccccaacccccactttgctgggtccttaggcacatcctaactgaacgcagaagcccagcctgggcagtcatttgaaggtaaattgatttgctcatgtttgtgtgtccctaaggtcatcatatctgtcagccagctgatagcagacgttgttggcattgggggaaccagattccagcagtccctgtccatcatcaacaactgtgccaacagtgaccggcttattaaggtgggtagcctggcccatgttagtttcaccctgagactctgcatcagcacctgaggtgcttgtggacaggcagcaaacagaggaagccatgtgtcctttcctcttccacccttgttttagcacaccagcttctcctctgatgtgaaggacttaaccaaaaggatacgcacggtgctaatggccaccgcccagatgaaggagcatgagaacgacccagagatgctggtggacctccagtacagcctggccaaatcctatgccagcacgcccgagctcaggaagacgtggctcgacagcatggccaggatccatgtcaaaaatggcgatctctcagaggtagtagccctgccagccgcttgaatgggtttttgaaaaaaccagtgaggccccattcacttaaaaagccagttttgagaaaagttattccattaatcaaaaaccaattaaaagtatgcaaaactttaaacagtatgaagcttagggtgacttcatagttagctgagcattttaataatttaaaacaaattgtaaggggttatttttgtcaacaaagagcattgtttaagctcttaaacctattcatacagtctcctgctaattaaaatacacatcaaaattcctctgtagttctaaaattcagctattttatgatcaaatgaattcctcctgttatttaaggtaatgacaggtgttgctttctcctctgtagggtagtccatttccttttgtggatgcagtaggtattccagcattcccttctatgcagagctgacgtgtttcaatatgtagactgcatggctgggagttgggtgtgtgggctccagtacaagtaatattggactttgaatccaagatccaatattaactaactctgtgacattgagccagttttttaacccctctattgctcaatgacatcatctgtaaaatggggaattgaagaaaacaattggctgtaaggcagtctgtgcgcctaggagaactcattcagtgtctgtgcctgagatgtttagctatgatcaacattattacaatagcaagcaagttttgacttttaaacttttataactgtttgaattaataaacatactctaagtctgaaaattttaactatttttacatatttatttttcaaggagctcaatatgctaaaaagtacacattaacgtgacagttttgactataaatttaatgtaaaccacacattggccataataaaaaggaataactaagagaagtaacttttctatcattctaagaatttaagattctttaatgacatatgtggcctaggtctcaaaaaaagaaaggaagaacttactaagcttcagctgttcctctgtgaattagttttacatggctgccataacaaagtacccagactgagtggcttcacacagaaatgtatcctctcacagttctggaggcagaagtccaagattgcagtggcagcagggccacatctccgaatgtccttggggagaactggttccatgcctgtccctgagctctttgtgttgccagcagtcttgatgttccttggcttgtagccacatccctccagttcctgcctccgtggtcgcatagcatccttccccatatgtctatgacaccagtaatgttgaatttagggcccaccacacaccagtatgacctcatcttaactaattacacctaacagagcctgtttccaaataatatcacattctgaggtctcagggaggccatgaattttggcgggacactacccaacccagtatacccagtgaataagggacgaaagcagctaatttataagatttcttattgcccttgccgtgtctggttttgtgtgtgtgctcagtaacccgtcatgtactttcctgcctgttcagtgcatgtgaccctgctttgtactgcaagagggacacacgtgggaggcatgaactctgcctccgaggactggacagtacataactccactctccaacagacttctctctgcacacatcagagtgcatgccacgctgctaacattcgttgacacacgtgcacgtggagcagcctctgctggtgtgtgttggctagtagctaggggtgagggtctagacgagggcaccacgtggtggcgctcaccccgctgacaggcacagaaccgcatgcattagaaccttgcagggggttcgcttctaacagctgtctttgatctttataacaccatggcaatttggtgaaaaaatttcttttttctttcaatttaagatacgtataatgttacctatttgagattaaattatgatttttatttagaattttatatttggaaaaaattataacttgctcttaatttttaagtcaagcgaaaaatatattagcacctgaaatttgagccattctctcagaatctagggaggagcacatgttttcttcaaagcatcctcttttcgctttgagagaaatgatgcagaagtattaggtatagtaagaggaaaatgctgcttttatcttttactttacaaatgtaataattctatatagaaaaaagccttagcaaatttactgccatttatctcaactcccaattaatttcaaattttcagcttatgtgagtgattccactctcttcaaaaggtaagatatcagctattagaaatactagctggtgcattgagatctaatatatacgttcatacattgattagatttctgtctgtgtgggagcattatgacttgctgttatgaatgatgattctgaggcatgtgtcttctattataggcagcaatgtgctatgtccacgtaacagccctagtggcagaatatctcacacggaaaggtaaggaattattctcatgttttgtgaaattaattagtataaaaccacacaaagcagcagacaagtgagagccattcaggaagattggaaggtggggatttgtgtgtttgtgaagtgtattcgttgttttatcccctggcgtgatgtttgcttgaattggtgggcacagcagaaattgccaggactagacagaaaagtagatggcatgttgtcatgtaacctcctctgatagcttcactctgcaaaaactagctaatgagttttgcatctggccaaatctagagctaagaagatactatttttcccttaagatagttcccactagaatgtttaggcaatcaaaaagttgtaacgggagattatcagacagcatttctgcaacgcagcccagctggctttattgtctaagaaggcagcctttctgatggaaaccttatctcccagaggaaggagagggggcgaggagtgacgcttcatttgtgcactctccgtttgtgcccagatgagcaggccatgaattctttcacagtttccctttggttaaacagcaggtgctcatttccacttcaaaatcagcacagccccaaatggtgacatttatttttagaatactgaggttcttagaaaagctggtagtctgcgtgagttacatgggagaaaacagcagcaccagatctgggctaatgaggaatagatgtacgaagtgagaaatagtgtgaaaccaaagatgccgaggccacagactgtatatttctggtgcagctggctatttggaatgaaacagcagagccccaaagagaaaaattttgaaagggctccatgttcatttaataccggtactatttcctgttgagaccttttatcaggtgatgcatttcctcatgtttagaagcagtccagtgggagccgccccttctcccccacagccatagcgcctgcctgaggaggagccggggaggtgagcctgaggatcagcccagcccccggggaccccctgccctggtcacgtgccctcccgtggtgggggatttgcccttttaactttgcatggacagacttcactctccttccctcctactctgtggctctctggttggctggtctattcctgtgggcacaagaggaaagcaccttggccaccatttttgttattccattggctccgagttatgtggtgaaatgtactatatagcctagagcatgggtggttggtttttttaattttacagtttgtatgttaatgtatcctcaagttcctagattaatgcttttcatgggagactcttgtttccatataacaaaataaaaactaaactgggatagtggcagatgctggataatccatgaatagtgtagaaacctgggatcatgtgcagcagaaaaatctctgacttcaggatctccgttttcaaggcttgatttcagaataccctgtgttcctctttctccctaaatgtagaagtctcaattcaagtttttacttctgttttattttattgtgaacagttatctcaaaatagagtagtggaacatctcatgcccttcttcacttgatcattttgcatagctgacgtggtccaactgacttaaagctgttttccagtgactctaagacgaggaaaggtcccaaatgggctgtcattgcttaagaaacacatccttatcccagacattgatcctgcctctaagctaacaccatttcctcttggagaatcagagtgcccaggcatccatgccctctgttgatgcagccagccacccaccccggggcctctggggtgggaaccagctaaggcagcctgtctgctcaccattatggctacgaagctacacctgggttgtgtggggaagctctcatctgagagatgtgttcttccctggccagagtgggtgaggtgacagcttgaaggaaacagttctttttgaatcatacatttctcttatattggctttgcctttgtttttcttagtatctcagcacgagtcatcctaccaagacaaattttcacttattgttattttactattactttgatttaatacctatttctcagtttatagtttaatatttagagattgcatacattttaataaaggtagataaaaagggataaggaaaagaaagtgaaagaggttagggttcactatagggaagaaaagcacacagtagccccaggtacccccgtgaatgctggcctggtgcctaagagatttcaaaatccgttatttcattcaacacagaaacacacagggcaggaaaaaccctcagggttcacccacgttcaggttcctaactctgactgtccctccttcctctcttcctaggcgtgtttagacaaggatgcaccgccttcagggtcattaccccaaacatcgacgaggaggcctccatgatggaagacgtggggatgcaggatgtccatttcaacgaggtgcgtgcttgaactcatgtgggctttcaggtactggggtatctgggagcctgctgtttgcattgctagtgcatcagaccagggctttttcctccctgtagctgctacttatacacatagctctaactgagatgattctccagacaactgatgcagagcagcaaaagcttctgccgttctccccttctaggagtgtctcctttctttggaaagagatcatgaggggctagattgtaatgaagtgaggctcagtgcttgagcacatccggtaaaagttccaatatattggtcataaagtttctcattctttatagcagttaatttctctggctcatgagttttcttagttttaatctgacttttaaattaatgtctccagcaccagtcatatccccagggcaaactcaaaggcatgagaggccagactcgggtcctggtcatagcaacccctgtctagggccttggtccctgcctccgcttgtgtgctgtggcgcaggtcctatgggcccttaggaaacaggaccaccctgtcgcaccccctacagagaccagcaagtttgacattagatcaccgtagcaatgtctgcaaattccagtttcttgctaaaacaggttagccttgcagccacttatctgtaactggcgagttttgacataaaactagatatttgaataaatgccagttttctgctggcattcactcattcactctgtttccttttccatgcctatctgcctgaagggttctttgtgtgtacctgcctcccttcagcccagggcagaatgaaacagctgagggaaagctttttaatcctgcccatgttttaaggaaattgaagttgtccaatttctcccatggagtgaaagagcaagccaagaaaggagtcagtctcttccgcctctgctgcacctgcttcatcctgatttccagggccacagcggtgtggcatacggttgatactggggcttttaaccattctcatgccagggaggcaggcccttgaacacacatcctcatgacatgagctaggccataagtcagtggttctctaaacatggtcctggaacctttcagtgagtctttgaggcggtactcttgctactgaatgtctatgaggctgggttttctttgtacgcaatgacccaaacagcctgtcaaacaggctgtgtgcagaatggatgcacatttgggcttatcttgcaaaatcagacagtaaagagagttgtaaaaatggaaaatactactactcttcactctttttttttttggaaaaaatatccttttttatttacaaatgctatttttaaaatatgtaataggcttattgttttcattaaattaataagtaaatcttaattttgtttcagttttcatatctagtattgtaaatattgagagagaacagtcacataaactttgaggtcctcaataattcttaaaatctacgaaggggtcttgagctcaaaaagtttaagaaccactgttgtaaattgtctagtctcaaatggtcctcaaaattaaaaactaagcatgaattaaaaggataacatattgagtgtacttcatgtttaaatattaagataatttaaaccccaataaagttttctaggtatcctacaaaaaaagaaatagattggttattacgtggttttaacagttctgctgtttctccaccttgaaaggcctgggtggatggtcttttttgtttgtttgtttgtttgtttgttttactttttactctcaaatatgaaacctgccactgaaggatcaaggcccacatactcttggctttgaactcctcacttcaggcgaatttcaactgagtttttctctgagaagaggcatgactgcattgtctccttgcagaaaccaccctggcacctctgccgagtcagacctctggagtgtaccattttgtttggaattagataaggaaagcaacgatgccaggaacaattaaagattggaaagtagactatttttagtgacctatcctgcagagctgataaaatgaagcttgcatttgctcatctgattgagtaacaggctgagatagttattatgttagagcctaatgaattagcctgtgaaatcaagtgcagacagccttggggaaattgtgaatggagtcccctctaagtaataactaagcctgtgacaaggacccctttatcagctattttcagaagacggattcgtcaccttgtccttgaagcataaacttagtaaatctttaacaaggtccatagtacatgacaatctgtggtgattaggatgtgacacagcagggttataaagtcctgagcaagccttgcacatccagattgaaactaacgggaagcagaaagactaacatgttctaaaagacaggaaagcagaaattaccaggcacgtttttgcattggctgccaggatgttgcaagaaaaagagagatgaaaatctctgccagagaggaaggactttggggaaaatctggtgggagataagtgtataacacagttgaataaaaatcattgcccttttcatctacattattagatataattaaatgcctgagatgttctctaaagtgactttaagggacgctacctaaaaatactcaattctcttagcagcaggtctcagatgagtttttattggcaccaattccaccttccttgattctgagccgaagagcagactcctttccagctgcttttgattaataaagagaaacctccaattcctattcacaattttgttttgcaagactgagcctgtgtagattgaagaattcagagtttcctgtggtgtcaaaattccccatggcccatgtagttctgagatccctcccttgttaacgaatgcagtaccaaggtcctggaaggatgcaggtagcatagttgggagattgaagaaagtctaagaaaggaactgtttttaaaagttcagagagggtttagggaagccaacaagggatgttgcagtgccccgaggttagcagcagctgggcgtcaccccttaaccttagggagaaagggagaaattacatagaaggaccacctggcaggacctgtgagctttttagtaaaggactcctgagggcacccacgcagggaggaaaggagtaactgcccacctcactctcctcctgccccccagcctcctactggggcctatccttggccaaactcaacagcaaccagacaggaagtcaccatgcacgagtcctgcagtgtctgcttctcagagcagagcccaggagaacagggcccagaggagctccagagggaaaagtagaaagtacaggtgatcctcattatccacctatctgctgaaatttctttgtagcctccaaatcaatactccttggtacttttgtggtcattcagggatatgtacagagcatcaaaagattttaccactcaactatgtttccagctgaggccgaaccaggcaacactctgcttcttgttgcagctctcatcccattgtcagaggtgttcaaaccagactgactccatcttgagtgagggctaggaaaatgaggctgggacttgctgggctgccttcccagaaggtcaggcattctgagcctctagatgtttatggttaagggatcaaattaataatgtttactagacagacccagacttgagagtgtctagatatctcaatatctggagaagaaaggcgttcctgatttttctttaaagctaataatatcgatttttgcaaaatacagtaattaagaaaattaatcctttatcacagatcctcatagcagagcacatctccccatatatacgagtaatgtacctgggatggatgtgttcctcctcttactttcaggaacagcctcctctgtctatggagtagctgtactttgaccactttttactttcttaataaacttgcttttactttgcactgtggacttgccctgaattctttcttacactaggtccaagaaccctctcttgggatctggattgggacccctttcctgtaacaccatgaacaggcccccttttggtggtctactttatgccatgtttttcacatttgtgtggattttgttggcggtttgctgtttagaatggctttctggggttcctaagtgcaagaacactgccatgtgtaagttacataagctttgttcaagtgtgagttctagtgctgttggctatatatttaatgttaatgaatcaacaatatatatttagttagatgtctttaaacaaaacacataaaacaagtgtaggtattgattggttaatgaaaatgttgtaaccagaggctcccaggaactgaaccttgcattttccctaggaagcggacaagtattcactaattcacagtgactttatagaacataactacctcagatgacgagaactgactgtatctagcacacaaaactgttgttttacagaacagcaggtcttgccattgcagaattgctgctgaatgtaataaacattatatgaacttaactaggccagtctctggcttctattcgtcaaaattgtttctattcaggaatagttgccagtaagaagcattaagtgtttatatccatagactatcccaggagatagagacatcaacagaacatattcagggattactgtttacgtctcatccaagcgtggtggttaaacctttagagctagctcatgtccactttacccttgactgacagtggtcctggagccgtgaaagtcacatggcacatcctcagtgttacagcgattctccacaacagtagtggcagtgagtagggaacttggccagtggagtttgggtggctgttctgcctttgccggatgccagcacatactgccctacttcattttgcaaatgtggactgggcttccttggcactgagctgggggccagaggtctgagagtgagtaagctgtgatccctgccatagcacactacactcctactgctgctttctgccctctgaggagaaacacctcaaccacagtccctccagtctgaactggaagttgtctgagttcttcatgacttggaaatttctagattgacatatgttgatgaattccatagactggccatgtgccgtgtgctagttcaggaatgtgtaagtggaagtccctgcctcagagattttcatccagtgcaagaatcctcaagctttcaggttcttaggaattagttggatccctgctacaaatatagattcccatccttaccccccaaacccagattttgttgggtgggtgtggggcccgggaatctgtattttaagcatccaaggtgattattctgatgtaagtggtcctcaactgtaccttgggaaatgatgatatagtagaaatgtgcattatgctgtgatagcacactgttgcctaagccaggtcacacatttgcagttattcccaaatggtaggtaataccgatggcatctagcttcataggtaaggttagttaaattaatcctaaaatagagcaaatggtatctcaatgaaaaaatgtttaaataaccctgcacagacataggctcatgcaggcattttcatgcacatgtgtgcgcacacacacacacacacacaatgttagtgtgctgtttccagagacagatgctcagtgccttcaattgcatcactgtggcacactaaaatgggcctggataattacatttttaaaagcttccttgatggcttatgaacttgctgcactgagttccttttaagtctaggctaatatcataaaatattagcctagacttaaatattatgacatattttataatattaaaaatataaatatattatgaaatattttcccccaaccagcttttacttaacagttctttgcatatgtcaacaatataggaaaaaatatcttggaatttaaattgtaagcaaagtggtaaaaccatcaggcactccatatgactgccctataaggttatcactatctgaccattgtctggatttgttctggttttcaggtgcaatgattgctgagaatttaaagtaaattaataactggaatttctgctgaaaatgttattcatatatgctccaatgtttagttattgtgtcttggtctttgtgactgaataattttgtattggtgtatggtctctcaaactgaactgccggttgattaccagttatttctattcaaagaattgttacttgatgcagaagccgtaaaggattaggtatagagttggcattaacttgaataatatagcttactaaattaggatttaatgttcagtaatccacactctacttatgtgagaggtggacttacttttgtaatataaaagctatttttagtttgttattgggtaaaatctgtgctaactctgctttttatagtgtataataccatttatttataataataagtgatatttggactgataaactatagaatttgaatggcctctgagtcagaaaagaagacgaaataatgttcagtagagtataaaacttaatgatttgttatttcctagttcttgataaccatcaaattgtgagacttatttcataattacttactaagctctatctactttatcaaactttcctatttcccagccattttggagactctcccttgttgaagcccatctttttttttttttttttttttagcaaatataacaggttctcccataatgaactcaattatctgtatcatgtggtacatacattatatcatatatcaatacttatatgctacttaaattcaggttttgttgttattaaactattcacttatttataatttgactacacaagagtaaaaatagcatgtattcgaatcatagtttaggctagatgtggtggctcacacctgtaatcccagcactttggaaggcagaggctggaggatcatgtgaacccaggaattcaagaccagcctgggaaacatagtgagaccctatccctaccaaaaaaaaaaaaaaaaaaaaagctgggtgtattagtctgttctcacactgctataaagaactacctgaggatgggtaatttataaagaaaaaaggtttaattgactcacagttccgcaggtttaacaggaagcatggctaggaggcgtcaggtaacttacaatcatggcagaaggtgaaggggaagcaagcacgtcttacatgcaagacctgtctcaaacaaacaaacaaacaaaaaaccccaatcttagtctatcagttaaaaacatttgactcaggagaccacccataaattctgtttggcatatatttaataactgactaaatctagagctacttaaaatatacctgaaagcctgctgtatacagatatcttgcttggatacacagactatcattttaataccaagtaataagatcttccttatataataccttattgtctgttatggtggttgatgtgtgtctacatatgtttttatgtctcataaaattatctacagttgattattaatttatgtttgacttaggaagctccgagtgtgccagttcagtgaagatatcccttcccacctccacagcctcatctcttatcactctgattgcgattttagattccaggccctcaaactacatgtaaatcctcccgtgctgtgctgccttcaccctcttgcctttgcttgggctgttcctgcaacctgggctgtctcctctcttttccttcgtattcccacccccacctttcactttcacctgactaacccgatcctcttttcagacccagccagtcatcactctcctcagctttccatgcctcaccttcccttgtggccggacagatgctgctctttcccgcctccctgcacatttcgttattcgtgcactcccgccatcttttaccatctcttcctggacctagctcccacacgagactctgggctctaggagacagggagcgttccttcacctgactgttctttcttcacctgacctcactaccgcccagggactcactgactactgttaaatgaatcagtacccgttgctcgcaagtcagagtgcctgcccctgcgacttgcatcttgggcatgtatttgaattcattgggtcttcctctgtcctccgtgtcttaccatgtatatcacgtctcttctggttggtagtcttgagtctctagtacatcagttctggctcctctgaggatgaccgtgtgtgtctttgaggaagcaaatttcattcatgacacatagcctaatagaccatccaaaacctgcccttcacatttggtaaaaatctattgagtaatttttataaattatagaaactaaatcctatttatatagatttgttttataaccccagtgtcaagcgctgtgccttgcatgtagtagatgcttgataaatatttgaacaaatgatacaataggtggatgactcaatgatgtggtggtgaggacacatagttgtaactttggtaactctttgagaagaatttttcatttttaatgagattgcattaaaattgcaccagattattattatgctataactggtatggcgtggagttaagactctttatgtctccaatctgatccacaaaggacagggtgtcattgtagatttacatctactgtgtggaccatggcttactagtggactggtcgtagttttccacaaaaactttacatttctcggccgggcgcggtggctcacgcctgtaatcccagcactttgggaggccaaggtgggtggatcacaaggtgaggagattgagaccatcctggctaacatggtgaaaccccatctctactaaaaatacaaaaaattagccgggcatggtggcaggcccctgttgtcccagctactcgggaggctgagataggagaatggccatgaacccgggaggcagagcttgcagtgagccaagatcgtgccactgcactgcagcctgggcaacagagtgagactccgtctcaaaaaaacaaaacaaacaaacaaacaaaaaaaaattttacatttctctttgaaaaggcccaaaaatgagaaccgaaggtaccaaatgattagtctgtaagtaaacctaaggacagttttaaaatgggaaaagttccatgcccttgatggtttcattattagaagtatgccttgttatacaatatgtcttccccacgggaagctaggtcttcttagaattcttccacctctactgcagtcccacaacaccactgagagtcaagataataaatacacactggcagtgtatttgacctaagataggccagaaatgcaaggctttggtaaagggaatcttagcttatttcctcacagacaaggacagctattattatctagtaatatcgttaatattactaagaaaagtacacattgattcactcgtccaatagatactggactacccagtgtgtatgagaccctgtgggattacatagattatatagcctagtaaaaattaaggttattttattttattttattttattttattttattttattttattttattttattttattttgagacagaatctgactgtcacccaggctggagtgcagtggtgcgatttcagttcactgcaacctcctcctgggctgaagttgttctcccacctcagcctcccaagtacctgggactacaggcatgcactaccatgcccagctaatttttttgtattttttacagagatggggtttcactatgttgctgaggcttgtcttgaacccctgagctcaagcaatccacccaccatgccttcccaaagtgctgggattataggcatgagcacttagggaggccgagatgggtggatcacttgaggttaggagtttgggaccagcctggccaacatgatgaaaccttgtctctactaaaaatacaaaaattagctgggcgtggtggcacacccctgtaatcccagctacttgggaggctgaggcaggagaatcacttgaatccgggaggtggaggttgcagtaagccaagattgtgccactgcactccagtctgggcgacagaatgagactcttgtctcaaaaaaaaaaaaaaaagacgtacttctttataatacagatacaaaggaaaagagtgggtgtgaaaaccttttctgatttcttcatgtcatttgctgctatggtggttactacatgtatctggctttagtgtttgtatttatgagacctgcaataaaagcaggcaaaactgatgtaccttttaataagcaccggtacagagttcagtcacacaaatgacacttttatgactcgtgtgctataaatatgatgtaggaggtaaatggtcttgcttagatagcgttttctgctaaattgagtcacaactgctttacaaatgtttatttactttgaatctgtaatctttgtaggcattagtcctgtagtgaaacattagggctggtaatgaaaaacacaggccttgcccttcatttacagtattgtgaaggatataaacattttcaaaagcaactatagacccttaataaaatattagtaaattgaaggctgggcgcagtggctcatgcctgtaatctcagcactttgggaggctgaggtgggtggatcacctgaggtcgggagtttaagaccagcctgaccaacatggagaaaccctgtctctactaaaaatacaaaaaattagccgggcatggtggcacatgcctgtaatcccagctacttgggaggctgaggcaagagaatcgcttgaacccgggaggcagaggttgtggtgagccgagatcacgccgtcgcactccagcctgggcaacaagagtggaattctgtctcaaaaaataaaaaaattaaaattaaaaaaatatatattagtaaattgaatctagcaatacataaaacagagaaatgcatcatgaccacgtagggtttattctgggagtgcatagctggctctgcattgaaaagccaatcaaattaattgatcatatcaacagaataaataggaaaaaccatatgattttctcagtagatgcatacagagtatttgacaaaattcaacatctattcataatttttttaaaaaaatgagaaatagaaggaacttccttaacctgaaaacaaaaagactgtctacagaaaacctatagctaccatcatatttaattgtgaaagactgaatgctttgcccctaaaattggaaacaagaccataatacctgctttactgactattcaatatcatgctggaggttctagccagtgtagtaaggcaagaaaaagaaataaatctttccatattcacataagacatagttataaagagaaaatcccgaagaacttggaaaataagctactaaaactgttaagtccatttagcaagatcacaggatacaagattagtatacaaaaattaacttcttcattcttatactatggttttactgtatagttcatgattacttaatgtaatttttagaaacaaataagctggatgatatttaatcttattcaaacaaagcactttcctttaaagtgatcatcaaaactttaaaacagtgctatttacaatagcataaaaaatatcgccatttatttcctatttagatatactgacattcatccatatgaaaatatgcaggtcattagcttactataatttacttttgacttaatggggcataaataaaactttcatagtacacatgaggtggatatttgatacacagaacatttgcggtgggctttctgtgggttagatgtaaagcccacatattttaatattcactattttaaatgagcaatgcatgaggggaatgcagtgtcagtacctggcctatttttaaactagtgtaatcaccctagtcataccattcagtatgtttgctttttaaaataagtaaccacaattaagttgttgtagcccttgcacttcaagagatctagtctttactttcagttgtctgttaggtccattctgtttactagacggatgttaataaaaactatgcgagcctgaatgaattctcagccaaatttagtcttgtctctcatcttgattggattaattccaaattctaaaatgattcagtccacaatagctctaggggatgaagaatttgccttactttgcccagttcctaagactgtgagttgtcaaatccctagactgtaagctcttcaaggagcaagaggcgcattttctccgtgtcatgtaatttttctaaggtgcttggcagcactctgtaccctgtggagtactcagtaccttttgtttgatgttgctgacaagacctgaaaaaaaatcccttaaaaaaaaaacccattaaagtgtagcaaaaccgaaaaaaaaaaaaaaaaaaaaaatcctgtggtttgacacaaggatgggcacatatatcaatggaacaaaacagagagtccagaaatggacccacacacttatgatcagttgatttttgacagaggttcaaaggcaatccaatagagaaagcatagtctctcatcgaatggtattgaaacaattggatatacatatgcaaaaaagaatatttatacttcattagaaaataacccaaaatgggtcatagtctaaaatgtaaaatgtaaaactataaagcttctggaagaaaacataagagaaaatctttgtgaacctgggttagataaatatttcttaaatataacatataaagcataatccaggaaataaaaacttgataaactttgtttacaattaaaaacttctgctctttaaaagacactgttaagaaaacctagacataggcatacagaccgtggcacacgtctgtaatcccagcacttttggaggctgaggctaatcacatgagggcaggagttcaagatcagccttgccagcatggcaaaaccccatctctactaaaaatacaaaaaattagtggggcatgttggtgcacagctgtaatcccagctacttgggagacagaggttacagtgagccaagatcatgccactgtaccccagcctaggcaacagagcaagacccagtctcaaaaaagctaaaataaatttaatattaaaaaaaaaaccctagagacaaatcacagattgggagaaatagttacaaatcacctatctggcaaaggacatttatccacagtatataaagaactctcaaaattcaataataagcaatccagtagaaaaatgagcaaaagatttgaatagacactttaccaaagccatatataacaaatcaacaaattaaaattaattcagcatcattaatgaaacccctctaaaatgggcttaaacattagagatcaagtattggatcccactaggaaattccacggagagattaacatcaatcaatccaaacctttaacagagttattcatgacaccatcactttgctgggcagcagaagggaggcccttcactctgctactgaggcagacaggcccccttccatggccatgagatgaatgccagctcagccaagctacagtctggtaggagcatttcttagaattccaagctggggtcctaaaattcaccctgattggcctgcttaggtcacatgtccacccacgatgaagcaatgactgtggccaggaaatagatttgtgctgattagtgtaagtccaggccacaattcttaagccatgggtagtgttaacttcctccaaagttcaagggttttagtggaagcagagtaactacccaaacttcaattggtagaaatgtccaaggtgaagcaggcacggtgccccccacactccatcactaaatccctttaatttgtgttaaaatcatgcttagtaaggctccatgtcttagcattgtcattgttcctcagaaaaggaaaagaaatttctagatgatatttattaagacaactaggaacaaaaattgagagcccctgtgatggtatcagtgtcagtttttccatgtattatgcagttatgcagggtgatcctttttcgtttttgcttgtgaccatgatcgagaaaatggctccctaaaaaagaacgtggtgatgaaaaaatggctccctaaaaaagaatgttgttgtaagtgtggaagtgagtgttgatgcatgttgtctattgtgaaaaattcctcctggcagtcttagcacttagcattctgcaacgggtgccatgtcacgttccccataacgctcttctcttgctgttggccctcctctttgatcaggatgtgctgatggagctccttgagcagtgcgcagatggactctggaaagccgagcgctacgagctcatcgccgacatctacaaacttatcatccccatttatgagaagcggagggattttgaggtatgagagtgcctttttgtttttttcctatttgagagcatgacgctgtgacatatacccagacctgcatatatgtgagagaggaagcaggccatgggccagagatgagtgggggtctctgaccctccacgttacgctgaaggtggtggccagtcatcatctccaaatagtcatcgggtatcacccagacctgggccctacctctgtggagacccccacatctcaaactacagagtaaccggcactccactttcgaaaggctgccatgaacagagttttgtgatcaccagttgtcccttttctgagaactcttccttactccacctgcgtgaaaaaatggtgtcccttccgtccatcctgggcttgggaggtcatccagtttctctaggcatatcaaacagagcaggaaaagcaaaggccaagaatcacgttggggaaccatctctgacatcgcatcttaacttgaaaacagagtttgcttactctaatgtggaaatgtgatgggtcctcacgtgtgggctggcctttgggtaggaaatgttaccattcattaatgatcactacaagttgtgcagccaaaatgtgtgtgtgtgtatttttattcaagttcaaggacttttcacctccattatcacatttgttattttaaaatcgattctcctctttgcacatgggaagaaatgggctttgttctgctttccagaggctggcccatctgtatgacacgctgcaccgggcctacagcaaagtgaccgaggtcatgcactcgggccgcaggcttctggggacctacttccgggtagccttcttcgggcaggtgagcctcctgtccattctgcagactgtcctaagtcctttaaaaaaaaacaaaaacaaaaacaaaaaaaaaactataataaagttatatcttataaattctctgttttctgtaattgctaatttgatgaatttgtcatatttagtatgattcttatcttcctcagtagtaaactttctgctttttttctttcttcctgtcttttctttattactttcttaaggcagcggtaagttcttcctccttaagacattcttagcaacatctttggtacttcagtgtggtttgcaagtttgcttttcaagtctgtatgtttatctgtctagttattacaaactccaaaaaaattaacattttattccatttacagaaataaatcacctgttttcttatatatctatattgcatgttttaaaccaaaattaagactttctggtgtcctttgtgcctgtgcatctttatcctttgtagtataatatctccacaagtatatttacagtttttcagaaaccctataggaaagggtttatctaaatttaacttaaattttaaccttcgagtcccttaacattattaaatggtataaattataatacatatatttagggcgtgtggttttctatgagcattatataaccttcaatttattctgttattgtcttttataactttatagcaataccagtttacagacagtgaaacagatgtggaggtaattacagtaaatgcctaaaaagcaagtaatatagtgaaattactgcgtctaaactcctagtttgatgtggatgttttttgtttcatgctagcttgcatttttttttactgttttgtgcaccattttctctctcttaatttacgtgagaaactttaaaaaattttcttttaaacattaaccccagttggactttttaattttcaacctttttcacttcccatgcaattctaagccttgtagtcaaacatgattggtgctaaaacagatgatgactggtgatatgaaaatattttctgatattgagctacaggtctttaatatttttttctcatcggtaaagcaaaatacaatttatacaagctttacctaacttttactaaacttactccagacccccaaacgcttcagttcatgccataaaatcctgtgtgcatgggagccatcaggagaagggaggcatgtccacttctgagcctgcctgtcgtgggctgctcatcattttctagtgagttctgcttcttgggaaagtgaaacaggcttgactcccattagacttccctgggacagcttagtcttgtatccaaaatctttcatttcactcaacacttaatgactgcattcttgaataagtttgcaatgttgtgtttttcctttacctttgcacctagacttcatgttattagcattttctttctcattcagaaagcccatttcagcaggatttttagacccattcctttttttcccccttgtaataaaagaacgcttcctaggtggtaagccctgggcttacgttcagggatagctctaattgtgctttatgtcacagggattctttgaagatgaagatggaaaggagtatatttacaaggaacccaaactcacaccgctgtcggaaatttctcagagactccttaaactgtactcggataaatttggttctgaaaatgtcaaaatgatacaggattctggcaaggtatgaccatgtttggataagtttcatagcaatgtaatgttgtgattgattacatattatatatttttaaatgtatatagaaaaaaacacaagaaaaatattaaggattgttggccgtgagtggcaggtgtattttcttcctgatacctttagtgctttccattacatgcttgacattaaaaaatctttatcgcctaatttttgaaacatctaattttacaaaataattaacgtctgacaggatatgtcatttttagtccagctatttagaaactctgacagaatgaggcccgtggcttcgctactcactgcacctcttcctgcatgtagcacatgacttgccactctgtcactgacggctggatgtaaggacaggtgaacagatgggcggatgggtgaatggacacatggacaggccaaggaatgaactcaccagcagcgtgactgtgggaatggcgatcattttctgcttagagagctgtcctctggcattctgttctcatgaagacccttttggaacctgcacctttgtcctgtacctttgtgtgtcccaccctcctcaggacatctccaggaggtcaggtctccctctgcttcctgaaggtgaaacatggggcaagacggtttcactcccactgcctttaaattattcctgctaaagaaagttaagttttaataggtttggatacaattagaatgaatggccaaatggctttttctaaaatacaaataataactttttttttttttttgagatggagtctggctctgtcacctgggctggagtgcagtggcgctatctcagctcactgcaatctctgcctcctgggttcaagagattcttgtgcctcagcctcccgagtagctgggattacaggaacgcgccaccacgcctggctaatttttgtatttttggtagagacagggtttcaccatgttggccaggttgttctccaactcccgacctcaagtgacctgcctgcctcggcctcccaaagtgctaggattataggcgtgagccaccgagcctggcccaaataataactttctatgactttatgtattttcttctaaagtttcaggcacttttccatctgttttttcatttttcttcacaatcgtctctgttttgagaacagttctctttcatttgcctgccttataccagtatggtctccatgtgctctgcacagccatttcttttgtgtccctttttattgctctagaaggttaaatacaattaaaatgtgcaaaattgatttgttgatttgtcttcctaataaattagcttttgtttctgcataggaattgcctatgtttaattctctatcatgtcacagaaatgaaagtaccaccaattctagcaatgtggttttaaaagcatttatatgttaaatagaaactaaatttatcattagattagtctagattaatctgtacctgtattaaattaattgatctgcagctgttgcatctaatctcagctgtctgtagattaatgataatttggaggcctagcttccaaacattattcctaaaataaacatttatctctctaagccaaatatattaaaaatgcagtttaagaaacaatcagagaaatccagactggaggtcattcaataagaaaaccagcactttgggaggccaaggcgggcggatcacctgaggtcgggagttcgagaccagcctgaccaacatggagaaaccctgtgtctgctaaaaatatataattagctgggcatggtggcacacacctgtagtcacagctacttgggaggctgaggcaggagaatcacttgaacgctggaggcagaggttgcagtagctgagatcgcgccattgcactccagcctgggcaacaagagcaaaactctgtctcaaaaaaaaataaaataattcaatgttatgggaaaaatgaatgatagggaattcttctaaattaaacatgactagggacataacaactaaatgtaaagtgtgattgttgattagattctgatccaaacacaaatatctataactaacattctggagacatttgagaaaatgttaatatagactgggtattggatggtattagggaatcagtgttaatttgggtaggcatgataatgtattgcggttatagaagcaaatgtccttatttttaggagaagctgactgtagtatcctgacgtgtaccacttactttgaaatggttctactggaaaaaaaaaagtctgtatgtctgtgtgtgtgtgcacatccataagtgtatgtgtatgtatatttgaaacaaatatagcaaactgctagcagttgttgatccaagtggtggatatgtggatgtttgttgtactcttctctccgttatatttacaaataaaatgttggaaaataccacgtaggtaagaactgagtgattccttcatggagcaccaatctcccattgtgctgtttcaattaaaggtcaaccctaaggatctggattctaagtatgcatacatccaggtgactcacgtcatccccttctttgacgaaaaagagttgcaagaaaggaaaacagagtttgagagatcccacaacatccgccgcttcatgtttgagatgccatttacgcagaccgggaagaggcagggcggggtggaagagcagtgcaaacggcgcaccatcctgacaggtatgggccccagaagccgcatggacacgagcccggacacctcgccaaagagctgtccagagggattcagaagcttcaggactggaagggtctttcgagctcagttagccacccccacacccatttcagtttcacatttatctagtgcttccttttgaatacttgggatgtttttctgttgatctgttgacacttccttcttccacaagaccagaagctcatatccaatctaaggtcacttacccttctgagaatctgatgaaaatggcgtgccttatgtgcctagatgcttttgcacacagtctaaggtgacttatggactccaggtccagcagccacacccagtcctgggtctccgcacagggagggacccgtctcacacacctgtctcaggttctagcatggcctgctcagcggtctcaggctgtgagtaaatgggatgtgagcttggatcgccccacgctgttgcccccgggggctggccagctgccacttgaatgcctcctctgccaggaagctcactgcattcagtggctatccacgagttcagcttaggcagttttcactgatccctttggcactgtttagccagtgataacccactctgggaaatgtgttttgcatcatttcccggtccctggcaagtgtctagtcatcctggggtgatttttaccttctgtgggagagcttgacccatccctgcctcattagggtcagcgacatcactggggtaacctaacataaaatgctttcttgaccaagaaatatcagtgggagggccgttgagaatgccaggtgtgccagctttcaccacacgtcttccaaagagtggccctagttaagtcagaccaggaaagggcctgctccccggaagttggggttgttgagtttctgtctgggtaataatacacactatcataataagcggaaggagcgctgtggagatgctgcacccaggtgcttatcagctctcaccggcgaagcgtatgctttaaaaagagagactggatggcgtggggtttatatctcagtaaagctgttacaaaaaaaaaaaaaaaaatacaggtttttatgaattagcccaggacagcgtattgcagggagcttttcacactccctatgagggaaaagagatacaagttaaaacaaaactgtgttcttaaagtgtccctaatcctgcttgtaaaataagaagacagcatatataaagcacaaataatattgtcctcacaaacatcaccccaccccaaataatttaattatttttttaatgcacacatcagtagcaaattctcattaagccaaataactgcgcttccagatggaatcactttatgggaatcaccagcttacagtgtttatggttcagctgtgataactttccttctgaccctttaagtcagtggttacccaaggttggtccaggaccagcagcatcagcacccccagggaacttgttagagatggaagttccaggtccccacctccgaaactgctggatcagaaactctgggggcggggcccagctctttgtgttcaacaggccctcccggttatcctggtgcatgctcagattagagaactgctgcctttaataaacctagttcactgctgagtcagggtcaggattttttagtatggttattgttaaggcagtgtacggattcataaacattcattaccataggctgttttcccagggcacatttctccagggttacaggtcatcattttgttagagactactttagattagataaagcacatgagcaatgctctgtatctgcgggaacaaggggacagagagtgcgcttcagagagaggtggggcagacacctgtgttgttggcttggggattgccgtccacagctgtgggttgagacagcctaagcaatggcgaggctgtcctgggggtcctgtaggcctgggtcacagcctcattgtgtgaccttgggcaggtcactcttcctctctatgccttagtttcctcatctgtaaaatgcaagttaggacacttatctcattatattgtcataactttgtaaatagtaagaagcaagggaaagagcgttcttcattttttgctagatttcatccgctgttgagctagatacacacaccagggcgttctgaaggctagacctgagggttttccctcaagttatcaacccctcaggttcttcttccattgcattgctttgtacctaacctttggccttccaaaggtcaaagggagcccaggccttccctgccctctacaccaggaaaaggctcacctttctgggtagttcccagtcagctgactgtaactgtgcaatcatttgaaaaacctcatgatcaccctccagcctccttcagtggaaatttctgagcctgtcccaaagaaggggggcgaggagaagcctcctccacttctttcatggaacttttgccaaggagtttcttcccagtcactattccagagtcttccaaacctggattagcttccggccctccactttctattcaagacacacagaccagcagtcaccatacttatcactgggccttccccgtcctcctttctaaagggctggctcagtcggtcacctaattgtccaccttccagagccagtttggactctcatgcagccatttgggcagtaatgcattcattcattcaacaaaatgtattgcacactgaccatgttcccattggcaggctaatgaaacagacatctgtgggcctgtgcagctggcattctagccagaggagacagatgataaacagtacccagatgagtaaatataaccgtggtagaacgtgatctgtgttccagacaaagcaaaaggagactgggaacctggagttgacctccttcctcagaaacaggaaggcagccccactcttcccctgaagcacagccccctgtccaaatacaagcaggcatctgccagcactgcctccctgactagggagcagcgaggccgagtcctcaccatcctaccagggagctttgtggatccccagtgctaccacttaaaatctgtgaaaccaagtcgggaacccttcacctttcactgataaaacattgtgaaaaggcaacaggcctataagtacgtgacatatgaggttgcctcagggtggacatgttttccgcttttgtccagatgttgggtggcccatcggaactctgtgtttcacaggggctgggcctgtttcccatcctgtgatgagtccttcccaattgaactcttccctagccagttgctaactagagaccaggaccactcccatctgacgtttgcttgttcaaaaaaaataataagcttttaagtacatatctacctgcctattagtaaatatatgtcaagtgagaatattatagatatttctatattatatagagcaataagaaatgtgaaatagtaaatgagaacctgctgtttttctgttcatttttaaattaactcctttgtgttgatgtttaggtatctcattatgataaaggaaaacaatattaatcagatttttttggttaaaaaatatataagaaaaagtaaatatttttatttttatttcttattcattgctgtaagtttcaaaatacctttattagcactacagctccaaaagtttgtgaatttctggttcatgaaatcctttgcttaggagtatattctttgtgtttttttggtttgggttttaggggaatggtttttgttttcttttttgagacagggtctcactctgtagcccaggctggagtgcagtggcacaatcacagctcactgcagctttgacctcctgggctcaagcctcctgtgtcagcctccccagtagctgggactacaggcatataccaccacactcagctaattttttgtattttttacaaaattacaaaaattaggtttttgccatgttgcccaggctggtcttaaactcctgggctcaagtgatctaccagccttggcctcccaaagtgctaagattacaggtgtgagcactgtacccaccctaggaatatattcttacttattattttctactgatttctcagctttgtgcaagcttagcatgtgattcaaagttattctatggacaaaaatgaattttctcaaggatatttttatggaactattttctggacttaatctgttatgtagtatctcaaaattgtttagtcttttttatgttgtcaaagtcatcttatatccactaactcattcaaacctcagagcttccaaggaaggtttgagtggggaatgataacctcatttatttaaagacacgcttgtcacattaaaaggataacaaggacccaactctcttgactttacgagacacacgattgtaaaggaagacaatattctagctccatcaagtactagtatgtgtctttggcaagctttgggttccttattttaaaaatgtaagtaataatgacatgtataataatcacttctaataataatcagctcaataacactaaagctcgtgcaagccatgcagtaattctggggcttaccctctgcagccatacactgcttcccttatgtgaagaagcgcatccctgtcatgtaccagcaccacactgacctgaaccccatcgaggtggccattgacgagatgagtaagaaggtggcggagctccggcagctgtgctcctcggccgaggtggacatgatcaaactgcagctcaaactccagggcagcgtgagtgttcaggtgagccaggcacagcaggccggagggcagcaggggacgtccttgcccctgggtgacttgagagtcgtttccactaacaaggtctacttgagagcctcggtttaccaagtgatccctgctcccttcccccaacgtctgtgacatttctcctgatatcagagggggaggaaacctcatgatccctgccccccgccccatgaggactgactgtggggacaagagccagatctcatacactaccctgatttgtcagtatttggggaattctgggtgcctgattagaagcatcaagactcttctaaatacaaagaagtgtggagagcagtagattttcctataaaactgttgtttgctgttttctatgaaaattgtatccaaaaaagtaccttaagttttaccctcttaatggtatcttttgattaatgaattcattattttaatatagcccaatcaatcaatttttctttattggtagcatttttatgttctctttaagaaatctgtgtctactccaaaatttcacagatgttctcctaggttttcctcctttgctcagcatccacatccaggtctgcagtccatctggaattgatttttgtatatgttatagtgtaagggtcaggatatattttttccatatgaccttccaagtgatatacacaatttattgaaaagatcatctttgatctagatactaacatatatgttcagtttgtgaaaattcatcaagctgtatacacttgtgatatatgcgctttcccgtttgtatattatactttagtaagaggtttttaaaaagttatcttacttacatggtttcctagttaattggtaagtgttaaatcactccctccagtaacaagtatgactcttattttctggtatttttaagtgtatatagttcaagcacatgtttgttcatatgtatatgtacatgtgtgtatatatgtatttgtatatcctattgttttatctttcaagaagggtatgtttatgaaagttacatgtggattataatacataggttttggtttttttggttcattttctgaaattatattttgtcaacttcccatcagatccacgctaaagaaccgtgagttgttgcccaacatttttgtgtcattcaccacaaaagcatttacagatgtttttaatctctttccttatagtctcaaagacatatgtgccaaaataagttagcaagtgaacataagtattccagcaacatgagtgattatgtaacaggtccagaggccacaattttctgtagctaaaaacaaaaccactcaatcaacatgatcttggaacatccagcccctatggaaaggccgctggaggggtgtggcaccagtccagggtagggctggaccattgagctttgtaaaaggcaaaatatgccctgctaatttgatggtaaacttagcattttataaaattcccagtcatcttaaaaagcaagaaattccatgttgaaatgagaagattaagtttatactcatacctaccaaagtaacaacaaagttgcagccagaggaaattaactttatcattttatttgcgtatttctgtaattgtttcatcaagcagctcactggcgctgcagctttactgggcagagccgtctgcggagcttcttgtcattgcactccaagatcttgctattagaccttatggagtctcatcagccttcctctttctatcttcttcaaatacagaccgtcttgtatcattttagatgatcagtcattttggtcgtcttcaggtgatgaatacagttccccccacgcaccagcctggtgctgagttccaccctcaacgcaccttgggctgttcacccattgcccccggctcagaggtccccctctgaccactgtggctggaacctggaaccctcctgtgtctccacgtctggtgtgagttcctgtggctcagttttcctgccattgctagacaagtcctgcctaccatgggtcagaaccacacacggggagctcccctaattccttgctaagctcaccagaccttccgggaaatatcaagcagtgaccacatagtcacgttcttccccaggctgtctcagacgcctggaacattcttcttcccatcccagtgtgtccagccttctttctcaccacgttcttacctttccttacttatccagaatcagcagacccttcttagctgcttgcaagggtggtgcagggttctggttcactcaccgtgctgtctgctcctaacatctagctctccagcacaccgcaaacgctcacttcatcccaggatagcaaatcagtttgcccatggctgtctatacaattcaatgaaatgaacagttgggtttcaaaaactggaatagttactgcatttttcaatttttcactgaattcaccagattggcctgttagttcagtgtagtgcagcacaaatcccagtgactaaacaccttggaagtaagaatccttgacctggatttggaagacctgggctgtgatctctggcgttttgcttattggctcttcaaacttcaacaggcccctaagttttccaagcattggtttcttcttacataaagtaaaccatcatcacaagtgccctgaagatggctgagatcatggaatcaagtggtgtgcaacagagtgaactttgtggtttctttttgggcttaagttcctggaaggcagggattgtgagtagctcacgcgaacgggctttttagtgcctgcaaactgaaactgagcagatggtcatggtgattttcttcctagtggaactgaaaatctttgctctttgtctaggtcaatgctggcccactagcatatgcgcgagctttcttagatgatacaaacacaaagcgatatcctgacaataaagtgaagctgcttaaggaagttttcaggtaaagcacactgaaagcatctttttctcttcgagtattgatcatttctgtactcattcgggaaggagatgctgctggttggactcatgccttatcctctgcgtgcctttgtttctcccgcctgtaccattccaggcaatttgtggaagcttgcggtcaagccttagcggtaaacgaacgtctgattaaagaagaccagctcgagtatcaggaagaaatgaaagccaactacagggaaatggcgaaggagctttctgaaatcatgcatgagcaggtgagggccgcactggctccaacaacttggagttcttggttaggggtttcaagtacaccctatcatgacttaggccgcctgatatccttccagaactgtgacatctgaaggagaatgtagcataccacactcctgccatgctctagccccaggtcatttgggaacagctaacagattgcccatatgctgttatctacggcaagcaggggagagcgggcccgcctcctcgtggctctaagaggtggccatgtttcctaagctttctctctccccacccccgtctagccaaaaagaaaagaaaggaaaaactcacacgaaaatatccatactgttctgacaactttattcctttaatcctttgaaaaaagcaggacttgccaacctggtttaaggaattatctgttgcattcaatgtttttgctgtttaaaaatacagactgattccatttttgatgatgtacagtgggccttggcgccccagtggattcttcctttaagttccttgtcactatgggcatcttccctgattattttgctgttatctctttcctgtgggtttcttcagtaggattctatgtgtgggctcagttgtcacagaggagacagtgtcccatacccagggaatgcctagagcagcatccacattgttttttttgtgaggggtctgtctcagtcactgtcctttctttataattgacattagcaccttgataacacagaactgctctgtctggcccctccattatcgtccttcagtctggcacagtggaagccagggccgtttgtggagtgatcctatcccctgacagtttagttagtacattttcattgcaggaaacgaacgtcagtgtgtgagctttaactcacttgctttttttctcctccatgctaacacgttcagctgggatggtaatgtcatttttaaacattatttttctgataatctgacttagaaaaagctattacttttttgagtttgagcaactacagacattggcataatgacagtacatgggcagaggaaagcaccctcttctggacattttaaaaagtagaggccagacatggtggctcactcctgtaatcccagcactttgggaggccaagatgggtggatcatctgaggtcaggagttcgagaccagcctggccaacatggtgaaaccccatctctactaaaaaatacaaaaattagctgggtgtagtggcacataccctagtctcagctactcgggaggctgaggcaggagaattgctggaacccaggaggtggaggctgcagtgagccaagatcatgccactaccctctagcctgggccacagagcgagactccatctcaaaaaaaaaaaaagtagaaaaaaattgaaacgattagagaaatgaatgtctgaataattaagcagaacaggagggactcatgggaaccgattttcagagaaaacttgagatcttttctgtggagcctccagattcctatagaatggagagtttggtcagtgggtgccgacattgggcactagagaagatgaaagtagtaagagatcataggctgaaactgttaaactcccaaagtacagggatatttaatgcacttgctgtcagctgcaccttgaacttcccattatgccaacagctgtgaagactgagcccccgtgaacccctgaagggccgtggcgggggtagacttgctttcgatgtttccaggggagcctctgctggaggtgaagacctacactcagatccttccaggcaccactgggcatggaaagatacttgttcagggtcagaggagtagccaccctctcccaagacaaaatccgtaagaccctgagaaaaggaggcaggagagaaacacaaatgcttcaaattcatttttaaaggctttttcaaggtcaaggctaggttgtgtcccagtcaagcacatgtaagtagacctcacgttgccttaagtagacctcacgttgccttatgatctggtgagcgtagaaggctctccattcactagctttgtaaaagaaacaaaatgtgctgttcttgactttctccttataatcctcacctgaaaacagtcatttatgagataagctgaacatctccctctgtaaaccagcagccaggctttccggctgcacatcactcacgtgatggagtgagtgtagacttgtgtgtgtgatgtggggtgcaacacattgagaaatatctgcttgcatccttatactcagtaacattgtgttgcacgtggcaacattgccttaaactctgtaacattttgttacacttggtaacattgtgtcacacatggcaacatggcattgcatatggtaaccttgtgttgccctcagtaacgttgtgtttctgtcctcaagatctgccccctggaggagaagacgagcgtcttaccgaattcccttcacatcttcaacgccatcagtgggactccaacaagcacaatggttcacgggatgaccagctcgtcttcggtcgtgtgattacatctcatggcccgtgtgtggggacttgctttgtcatttgcaaactcaggatgctttccaaagccaatcactggggagaccgagcacagggaggaccaaggggaaggggagagaaaggaaataaagaacaacgttatttcttaacagactttctataggagttgtaagaaggtgcacatatttttttaaatctcactggcaatattcaaagttttcattgtgtcttaacaaaggtgtggtagacactcttgagctggacttagattttattcttccttgcagagtagtgttagaatagatggcctacagaaaaaaaaggttctgggatctacatggcagggagggctgcactgacattgatgcctgggggaccttttgcctcgaggctgagctggaaaatcttgaaaatattttttttttcctgtggcacattcaggttgaatacaagaactatttttgtgactagtttttgatgacctaagggaactgaccattgtaatttttgtaccagtgaaccaggagatttagtgcttttatattcatttccttgcatttaagaaaatatgaaagcttaaggaattatgtgagcttaaaactagtcaagcagtttagaaccaaaggcctatattaataaccgcaactatgctgaaaagtacaaagtagtacagtatattgttatgtacatatcattgttaatacagtcctggcattctgtacatatatgtattacatttctacatttttaatactcacatgggcttatgcattaagtttaattgtgataaatttgtgctgttccagtatatgcaatacactttaatgttttattcttgtacataaaaatgtgcaatatggagatgtatacagtctttactatattaggtttataaacagttttaagaatttcatccttttgccaaaatggtggagtatgtaattggtaaatcataaatcctgtggtgaatggtggtgtactttaaagctgtcaccatgttatattttcttttaagactttaatttagtaattttatatttgggaaaataaaggtttttaattttatttaactggaatcactgccctgctgtaattaaacattctgtaccacatctgtattaaaaagacattgctgaccatt

SEQ ID NO: 22 - protein, 2069 aa, Homo sapiens
MSQPPLLPASAETRKFTRALSKPGTAAELRQSVSEVVRGSVLLAKPKLIEPLDYENVIVQKKTQILNDCLREMLLFPYDDFQTAILRRQGRYICSTVPAKAEEEAQSLFVTECIKTYNSDWHLVNYKYEDYSGEFRQLPNKVVKLDKLPVHVYEVDEEVDKDEDAASLGSQKGGITKHGWLYKGNMNSAISVTMRSFKRRFFHLIQLGDGSYNLNFYKDEKISKEPKGSIFLDSCMGVVQNNKVRRFAFELKMQDKSSYLLAADSEVEMEEWITILNKILQLNFEAAMQEKRNGDSHEDDEQSKLEGSGSGLDSYLPELAKSAREAEIKLKSESRVKLFYLDPDAQKLDFSSAEPEVKSFEEKFGKRILVKCNDLSFNLQCCVAENEEGPTTNVEPFFVTLSLFDIKYNRKISADFHVDLNHFSVRQMLATTSPALMNGSGQSPSVLKGILHEAAMQYPKQGIFSVTCPHPDIFLVARIEKVLQGSITHCAEPYMKSSDSSKVAQKVLKNAKQACQRLGQYRMPFAWAARTLFKDASGNLDKNARFSAIYRQDSNKLSNDDMLKLLADFRKPEKMAKLPVILGNLDITIDNVSSDFPNYVNSSYIPTKQFETCSKTPITFEVEEFVPCIPKHTQPYTIYTNHLYVYPKYLKYDSQKSFAKARNIAICIEFKDSDEEDSQPLKCIYGRPGGPVFTRSAFAAVLHHHQNPEFYDEIKIELPTQLHEKHHLLLTFFHVSCDNSSKGSTKKRDVVETQVGYSWLPLLKDGRVVTSEQHIPVSANLPSGYLGYQELGMGRHYGPEIKWVDGGKPLLKISTHLVSTVYTQDQHLHNFFQYCQKTESGAQALGNELVKYLKSLHAMEGHVMIAFLPTILNQLFRVLTRATQEEVAVNVTRVIIHVVAQCHEEGLESHLRSYVKYAYKAEPYVASEYKTVHEELTKSMTTILKPSADFLTSNKLLKYSWFFFDVLIKSMAQHLIENSKVKLLRNQRFPASYHHAVETVVNMLMPHITQKFRDNPEASKNANHSLAVFIKRCFTFMDRGFVFKQINNYISCFAPGDPKTLFEYKFEFLRVVCNHEHYIPLNLPMPFGKGRIQRYQDLQLDYSLTDEFCRNHFLVGLLLREVGTALQEFREVRLIAISVLKNLLIKHSFDDRYASRSHQARIATLYLPLFGLLIENVQRINVRDVSPFPVNAGMTVKDESLALPAVNPLVTPQKGSTLDNSLHKDLLGAISGIASPYTTSTPNINSVRNADSRGSLISTDSGNSLPERNSEKSNSLDKHQQSSTLGNSVVRCDKLDQSEIKSLLMCFLYILKSMSDDALFTYWNKASTSELMDFFTISEVCLHQFQYMGKRYIARTGMMHARLQQLGSLDNSLTFNHSYGHSDADVLHQSLLEANIATEVCLTALDTLSLFTLAFKNQLLADHGHNPLMKKVFDVYLCFLQKHQSETALKNVFTALRSLIYKFPSTFYEGRADMCAALCYEILKCCNSKLSSIRTEASQLLYFLMRNNFDYTGKKSFVRTHLQVIISVSQLIADVVGIGGTRFQQSLSIINNCANSDRLIKHTSFSSDVKDLTKRIRTVLMATAQMKEHENDPEMLVDLQYSLAKSYASTPELRKTWLDSMARIHVKNGDLSEAAMCYVHVTALVAEYLTRKEAVQWEPPLLPHSHSACLRRSRGGVFRQGCTAFRVITPNIDEEASMMEDVGMQDVHFNEDVLMELLEQCADGLWKAERYELIADIYKLIIPIYEKRRDFERLAHLYDTLHRAYSKVTEVMHSGRRLLGTYFRVAFFGQAAQYQFTDSETDVEGFFEDEDGKEYIYKEPKLTPLSEISQRLLKLYSDKFGSENVKMIQDSGKVNPKDLDSKYAYIQVTHVIPFFDEKELQERKTEFERSHNIRRFMFEMPFTQTGKRQGGVEEQCKRRTILTAIHCFPYVKKRIPVMYQHHTDLNPIEVAIDEMSKKVAELRQLCSSAEVDMIKLQLKLQGSVSVQVNAGPLAYARAFLDDTNTKRYPDNKVKLLKEVFRQFVEACGQALAVNERLIKEDQLEYQEEMKANYREMAKELSEIMHEQLG

SEQ ID NO: 23 - DNA, 11678 bp, Homo sapiens
  CDS (74)..(530)
  CDS (3975)..(4025)
  CDS (6162)..(6311)
  CDS (6481)..(6666)
  CDS (6774)..(6966)
  CDS (7329)..(7925)
  CDS (8744)..(9614)
tccctctcccccccttctctctctctccgaggggggggggtcccagggagggagggggggtcccccgatcagcatgtggctcctggcgctgtgtctggtggggctggcgggggctcaacgcgggggagggggtcccggcggcggcgccccgggcggccccggcctgggcctcggcagcctcggcgaggagcgcttcccggtggtgaacacggcctacgggcgagtgcgcggtgtgcggcgcgagctcaacaacgagatcctgggccccgtcgtgcagttcttgggcgtgccctacgccacgccgcccctgggcgcccgccgcttccagccgcctgaggcgcccgcctcgtggcccggcgtgcgcaacgccaccaccctgccgcccgcctgcccgcagaacctgcacggggcgctgcccgccatcatgctgcctgtgtggttcaccgacaacttggaggcggccgccacctacgtgcagaaccagagcgaggactgcctgtacctcaacctctacgtgcccaccgaggacggtaagggcgcgggcacaaagccgggcaccccgtggacacagcccacaaacgcacatgcagaccctcaggcactggcaccgctctagggctcagagctgggcctttgtgggggcagtgagggacggagtgtccctgcaacctctacgtgccccctgaggattgtaagggtgcctccaggcagtcccaggcacacactctgcagacagcctctccataagttctttacgcccatggggggccatggtagggatggcaggcactggactaggctcacccactgtctccccaaagaggcacagtctgccagctaatctcaacctggccacggagggggaatcaggtgatccatcctctgctcagacacccactccaaccttgccccgcctcccgccgccagacctgggcttgttcctggcagaatacccaggttagctacatctgcaccccaaggacaacgcaggctctccctctccccctggctggtgagggctgccttccatctatcacatcatgtccagagccccttgcctgagctgagcaccttggcagtggtaccgatgtccttctcttctcccttgacccctgtacgcccctgaaggatcagggaagctccttgctgagggccagcacagcccacccgtcttccctggggctcttgaatttctgttcttaatgaactcttgttcactacaggactgctcatagcccctggcacattccttctggacagttctccaccctccatcctcagcactccaagactaatcagaacaccttccagagtgtgaacagggtgcaataggtggattccagccatctcagcagaccagcctcacaaacacccccctgcaccccgcatggctcttctgacacccatcttaccactccaaaacatggcagcgtctgcgtatagaccatccgctgccaccacgcttcccacagtccatgtttccagcaaccttacacataggcctggtacccaggagctcctaatgtaccctgtacatacccagcacctccacggcatgtgctcaagtcccaaaacagatggcaaatcccaactactccacaattaaatcatcacccaaccaacctgtacactgaccttgtgctccagcaccccacaatcacaattcccagtactttcatatcacacacacccccagtacatctctgaaactatgtaccatgtcacccacacacacctgtgctccccagcatccctggatatagatcacgtgccttaagaacatccacacatccagtaacctgcgcgcctgggccgtgtgctcagcaggcccctcacatcacagtccccaacatccccaacactcctcaatcattgtttaccccactcctacctagagatcatctgcaccggacctcaggtggtgaaaacacatccggcaagcttgcaccctactcaccaaacaagtactccaacaccatgccccctgcactcagaatccccccctgccaaacacggaacatctcatgcacctccacccacccatgtccatcccaatacctcgcaaatggaccattcaccctgtatcccccatcccagccatacccctctccatataaaccacgcctccccacaacccatacacacaatgcacagagcgtcatctactctaatcctattcaaatttgaagcaccctagttccccataagccatttatcccagtacatgccccacgtgccccccagtacaatgccctccacagaagagctgtgcacaccacactcctctgccatcccagcgcctgccccatcatgagtccttcacctcagcacctccatgtgggctgcccatcccagcactccctactctcacacaggctctgcacaccccagggccccctcatgggtgctgtctcgtcaccttccatgtgaaacatccacccagcacttgtcaccaatggactgtccaccccaacacctccacacagttgtccacccctgcccccacaccacccttgcccacaccttctgtatttttagccactgctgattgcagacctgcctggggcctgacacattcaggtgatctcactgaatcttcacaccagctctgggaggaagaggttgactcaggcgcgcgcgcgcacacacacacgcgcttcatagactcacgtgcacacgtgccttgctcactttgtccccaccccatcctctcacaaagaagaggccctgttcccagcgggtccccatggggccatcactgccacttaggagacgccttccagagcttgccttggccttgacccatccttggccttgacccacgtgccagtccctgtgccattgaggaaaaaccaatcagcctcggggaacccccaggcctctgggctccagctcgcccctgaccaaccccgtaatctggaagaagccctgacactgggcgaacctggtgctcccggtacctgctggcacctgtgtgccaggctggctcagggcactgtgttcctcgttccctatctgtggactgaaccacccgctcggccgttggggaaggggtgctttttggcagtggagcaggggcaggggaggcagcggctggtggccctggtgggaaattcaccattttggggggaggagaggaagcctgggtaagggacgaggttggggggagtgcggagggttgagctggagcggagggcaagacctgatgacccccttccctgctttgcccacactggggagctggggtgagaagccaggcctgtgagtgtggatagacgagaagtgctggtggtgaggctgggtagcgggcgggcagccccagctgaccttcccatagccctccagtggggagcggaaggcttctggggctgagctgtggggcaggctgccccccaaccctgtcctgctcgctgccctgcagagtggtccagagggaagcagagtcttttctgcggcagtctctcctccctacagccttgtggggggcggcaggcaggtgcttcgctggccctgaagggggccttctgagaggtggcctgggtggcaagctggccttggtctcccaggggctctgggtgggcttcccctcccctcccaccccacctctaacactgtttcatttccagcaattagcaaacacatcgacaagccaaaacctttccagccaagtcgatatgtcttaagacaggcctcagcccactcaggcaccccacccccccaaaaccagccttttctttggggcatgactttttctggggaggggaacaaaattgggttgtagaaacgtttttctcttttcttggtttctttttcttgcaaacaaattttgcttttttttggcttcttttttctgcctcccccaccctccccttttctgctttctctcctcccctccccatccaccacctccccccgacccccatctttccccacaaaattgtccttttttctctgttttgtgttcccggtcttaggtccgctcacaaaaaaacgtgacgaggcgacgctcaatccgccagacacaggtagatttaaaaatcccgctgctgcatgtggttgcttataagaggacattcatggccctgcccctcactaaatgtccccacagccctcaaggcccctcagtcgttctcccaactaaaatgaaaaagaaaagaaaagaaaaatgtttaataattggaaaaaagaattatgaaaacttcaaacgaaatttgaacaatgttggacccagtagaaaacctgccagaaaagctaaacatggtgaaaataagctgaaaaacaaaaagaaattggaatgtcagaaaaataaaattcaaaagaattggttaaaatgtttagaatttgaaagaaatctggacagttttgaaacttgtgaaatgtaacatttgaaaaaaccaatttgaaattggaacaaaacaacagttcaaaaaaaatttaaaagttggcaaattgatgacaccattgaaacatcagaagcctgtcgcaatttccaaaagcctgtcagacacagaaaacgcaaacattcgaagtgaattaaagaatttgacaattttttaaaacagggcccaatatcttgaagtttcaccacaaaattttgaaaaaaaaatgcaaagaatttttttctttttttcttttttcccaaaatggatctttttgttttttcttttcttgttgaatctgccccgagagcttcttgctttttggttgtttttttctttctttctttctttcttctttcttgatcctgtttttgttgttggttttgaattcttgtcgccccagcccctcttcctgctccttccctttctgacccctcctcccctcacactgggagaggggtggggtgaggatgggagaactgaggacaattaggacaggaccttggagggaaggagattccggcctgaaagtgctgggaggtcacttgaggttcaggagcaaaggagaggacaggatttgaggagaacccagcgagggtgctgcccacatagaagctctggcggaagcagtcaggagcatgggggctgcacagggggtcttagggatgggaggcaggaagctgtctgtgaggtcaaggagaatgtcttagtgacctgcaggttgaccttctggcaggagggatgtttctaccaggatgagggaggtgggcagagatgctggggaccagctgtggaggcccaggcctggctttggtttgctgagtatccaggctagcagggagggccagtgtcaagaaagaggagggcctgtgggccaggggtgaccccagccctagcactatggctgaatcatggggagctgcaggggaggatactgtagcctcggggaccctggcaagcactctcagactcccacatcctctggaattagtcacccttcagtccaatctggagcaactcaagggcctgatcacatgtggcagtgatcaggggatcctcagggggtatggcgggaaggagcccagtgcagaacccagggctcaggccagtttgggggtgtccaaaactaagctgcaccctggcttcattaagcaggctcttcctcctcctgccacagtaattaggctgggggttgccatggtgactggggaggtgacctagaaaggaattagggcggggaggagaccaagccccagggaccctaggcctggcacccctcacccacagaccagggaccctaggcctggcacccctcacccaccgaccagggtgccatgtggagtggaggcccaaggcctgagtcggaggagacaccaggaccctcccagcagctccagctccagttctagcctcgggagcttgctcttcccagggacaggaaggagatgtgctgtgtgcgggggtgctgggggttccctggatccagcagatgccctaaggagggccactgcccacccccagcctctacggggtttcttggaaagtctgcattggagaagtgccgcggggaaggctggcagagggtggggagggaatgtctgccagggctagctggggagggaggaggggaatccggtcttgccccccagggatgggagtgacatgtcccctgagctccaggccagtcctcagcaggcctgggagctgggcgctgctgcttccggtctgactgtgtccttgtccctgaccccctggcccacctgcccacccctccccacacagatatccgtgaccctgggaagaagcctgtgatgctgtttctccatggcggctcctacatggaggggaccggaaacatgttcgatggctcagtcctggctgcctatggcaacgtcattgtagccacgctcaactaccgtcttggggtgctcggtgagggtgggcagccaactctggggctcgggggagtctgggaggtgggcctggtgggcagggttcctccacatccagcagaatggcttctgggctggactgagctgcccagaaagggggcaggggcgctgtgacacctccagggagccctcttcttctctactcccaggttttctcagcaccggggaccaggctgcaaaaggcaactatgggctcctggaccagatccaggccctgcgctggctcagtgaaaacatcgcccactttgggggcgaccccgagcgtatcaccatctttggttccggggcaggggcctcctgcgtcaaccttctgatcctctcccaccattcagaaggtaccagcagtgtcccagcctgttccacccttcccaaccctgccaactcccccctctccttcaggccggtactcacagcctggcctgaggtctgcctgtcccgccagggctgttccagaaggccatcgcccagagtggcaccgccatttccagctggtctgtcaactaccagccgctcaagtacacgcggctgctggcagccaaggtgggctgtgaccgagaggacagcgctgaagctgtggagtgtctgcgccggaagccctcccgggagctggtggaccaggacgtgcagcctgcccggtatggggtgggagagggctgggtccaggccttcaaggttccaaggaggctgaggtgagaggtgcctgtgggcataccatttggcaaggagggatgggcttctggcccccagtaagtggcctcctcttgcaagccttccttcagtggaggtgctcaatcagagcaggtgagcacagggtgccatgaagtgctttgggatgacttccagagaggccagatctcccaaaggacccactggaggatttcaagtagggaagaagggtcttgcaggtagagggaagcatctgcgtgtgggcttagcaggccacaggccaagaggaggccagtgagcaggtggtgagaccctgaccccttctccccagctaccacatcgcctttgggcccgtggtggatggcgacgtggtccccgatgaccctgagatcctcatgcagcagggagaattcctcaactacgacatgctcatcggcgtcaaccagggagagggcctcaagttcgtggaggactctgcagagagcgaggacggtgtgtctgccagcgcctttgacttcactgtctccaactttgtggacaacctgtatggctacccggaaggcaaggatgtgcttcgggagaccatcaagtttatgtacacagactgggccgaccgggacaatggcgaaatgcgccgcaaaaccctgctggcgctctttactgaccaccaatgggtggcaccagctgtggccactgccaagctgcacgccgactaccagtctcccgtctacttttacaccttctaccaccactgccaggcggagggccggcctgagtgggcagatgcggcgcacggggatgaactgccctatgtctttggcgtgcccatggtgggtgccaccgacctcttcccctgtaacttctccaagaatgacgtcatgctcagtgccgtggtcatgacctactggaccaacttcgccaagactgggtgagggccagaggggctgggcggggctgggcggggccctccctccttcacatggccgccgttcctctgttaaggcactcactctggcctgccctcttgctcgagtgaaaccaacccagacacctctgtgccaggcacggagttgagcgttggagactcagcagtatcagacagagaagccgctgtcctttctggggagttgggggcccactcagtggctttggcttggcgtctgtctctccctcctccttgcctgatcccccctgcccgacccccctagggctctgcatctctggctgactgctcaggtgtgtgtgtctgagtgtgtgtaagagtttgtgtgtctctacttctgtctctgtctctctgaaaatccactgacagctctccacctccctctgctgctctcttttgtctgcttacttttcgctttctctggctgccggctgatttcagcctggctgtgtatctgtctctggctgtccctcccgtgtctttgaccctgtctgtgtttcattcaggctcagcttctgcttctccctggctatctctgtgtgtgtccctgcccctctgcccgcatttctggctgtctctgccagtctgtctccatccctatttgcctatttgcctgaagagacaggcagtttctctgtctcttcatatccatctgtgtctctctgcctctgtgactttttctctggctttcttgctgtccccctgtctctctgcatctctgtctgtctccctgcccactgccatccaccctccttcagagccttgccctcactcctcctttccctgccctcctgtgcccacagggaccccaaccagccggtgccgcaggataccaagttcatccacaccaagcccaatcgcttcgaggaggtggtgtggagcaaattcaacagcaaggagaagcagtatctgcacataggcctgaagccacgcgtgcgtgacaactaccgcgccaacaaggtggccttctggctggagctcgtgccccacctgcacaacctgcacacggagctcttcaccaccaccacgcgcctgcctccctacgccacgcgctggccgcctcgtccccccgctggcgccccgggcacacgccggcccccgccgcctgccaccctgcctcccgagcccgagcccgagcccggcccaagggcctatgaccgcttccccggggactcacgggactactccacggagctgagcgtcaccgtggccgtgggtgcctccctcctcttcctcaacatcctggcctttgctgccctctactacaagcgggaccggcggcaggagctgcggtgcaggcggcttagcccacctggcggctcaggctctggcgtgcctggtgggggccccctgctccccgccgcgggccgtgagctgccaccagaggaggagctggtgtcactgcagctgaagcggggtggtggcgtcggggcggaccctgccgaggctctgcgccctgcctgcccgcccgactacaccctggccctgcgccgggcaccggacgatgtgcctctcttggcccccggggccctgaccctgctgcccagtggcctggggccaccgccacccccaccgcccccctcccttcatcccttcgggcccttccccccgccccctcccaccgccaccagccacaacaacacgctaccccacccccactccaccactcgggtatagggggtgggtggggaggccctcctccccggccctccctggcccggccactccgaaggcagggaggaggacttggcaactggcttttctcctgtggagtcgtcacacgccatccagcagcgctaaggtggacatgggattcctccctgcgatgcgtgtctttcccacgcagagaagcccagtctcttctctggatctgggcctttgaacaactggggggcgttttctcccccccattgggacaccagtcttcggtgtgtggaatgtggtattttcccgcgtggaggtgtgctttctcacaacggggtgtgttttcccatgtgcagggtgaggtttttttttgccaccctggacacatgttggccccctcaaagaatttctgtggggatttgtaccccagaatcctgttcccccatcccttctcccacctcctcccctctccctccccctggagaccctggaagtggtgtgttcacatacagtgacccttggccaccagaccacagaggatggagcctgggaagcagcgaggaaatcacagccccctcgcccctgcctcccttgcccctaccccggcgaagcatgttccccccgacgccccccttggcacaagtcagatgaagcacgttctgccggggaggccctcaccttccagagaggacagacacagatttcctgctgggggagggaggagtccacgcatcctgatgctgcctggaagcttattttcccgtggccaggacgcatttctctgagtggaaacaggttcttgcatgtggatgtgtgtttccccaggcagacggcccctctcttcccagcacttccctgcctcccccaggcctcaggcccagcacccagttcctcctcacatggcaggtgagcacagacttctagttggcaggagctgaggagggtgaacaaaccccgagggaggcccggcccttgctcccgagttggggggagggggtgtggcaacgtgccccccgcagaggccacgcatgtttgaccaaagccctcattgtggtccgaggacagccttttccccaggcctcagagcattgctcatccgtgccaaactgggtaggtggatttgagcggaaagactcccaaaatgtgccaagaatttcccagtcccaggcagggcaggggaaactaagggcaagcaggatacagggcgagggatgtggcaggtgagggggctcccgcctgtgccccttctcctcaccatgtctcccccaccctgcctcagttctccgttccccttcatctccgtccccctctttgaagctgtccccatctcagtgtcagaccagccttctcctcagctgaccaccctcctctgacccacgccccctccttgtctgaaagaaaggagccttgaatggtggagggaggcagtggggagaaaggtctcaccggacaggttgggagaatgaggtcagcggtgctggggaacagatggagggggcagtggggacagggcttgggcagacaccagcaggaataatttgaaatgtgtgaggtgactccccggagggccttgggcttgggcatttgggaaaagaatgatgtctggaagggcttaagggacacagtggacgaggggagagtcctcatctgctggcattttgtggggtgttagtgccaaacttgaataggggctggggtgctgtcttccactgacacccaaatccagaatccctggtcttgagtccccagaactttgcctcttgactgtcccttctcttcctacctccatccatggaaaattagttattttctgatcctttcccctgcctggtctagctcctctccaaacagccatgccctccaaatgctagagacctgggccctgaaccctgtagacagatgccctcagaattggggcatgggaggggggctgggggaccccatgattcagccacggactccaatgcccagctcctctccccaaaacaatcccgacaatcccttatccctaccccaaccctttgcggctctgtacacatttttaaacctggcaaaagatgaagagaatattgtaaatataaaagtttaactgtt

SEQ ID NO: 24 - protein, 835 aa, Homo sapiens
MWLLALCLVGLAGAQRGGGGPGGGAPGGPGLGLGSLGEERFPVVNTAYGRVRGVRRELNNEILGPVVQFLGVPYATPPLGARRFQPPEAPASWPGVRNATTLPPACPQNLHGALPAIMLPVWFTDNLEAAATYVQNQSEDCLYLNLYVPTEDGPLTKKRDEATLNPPDTDIRDPGKKPVMLFLHGGSYMEGTGNMFDGSVLAAYGNVIVATLNYRLGVLGFLSTGDQAAKGNYGLLDQIQALRWLSENIAHFGGDPERITIFGSGAGASCVNLLILSHHSEGLFQKAIAQSGTAISSWSVNYQPLKYTRLLAAKVGCDREDSAEAVECLRRKPSRELVDQDVQPARYHIAFGPVVDGDVVPDDPEILMQQGEFLNYDMLIGVNQGEGLKFVEDSAESEDGVSASAFDFTVSNFVDNLYGYPEGKDVLRETIKFMYTDWADRDNGEMRRKTLLALFTDHQWVAPAVATAKLHADYQSPVYFYTFYHHCQAEGRPEWADAAHGDELPYVFGVPMVGATDLFPCNFSKNDVMLSAVVMTYWTNFAKTGDPNQPVPQDTKFIHTKPNRFEEVVWSKFNSKEKQYLHIGLKPRVRDNYRANKVAFWLELVPHLHNLHTELFTTTTRLPPYATRWPPRPPAGAPGTRRPPPPATLPPEPEPEPGPRAYDRFPGDSRDYSTELSVTVAVGASLLFLNILAFAALYYKRDRRQELRCRRLSPPGGSGSGVPGGGPLLPAAGRELPPEEELVSLQLKRGGGVGADPAEALRPACPPDYTLALRRAPDDVPLLAPGALTLLPSGLGPPPPPPPPSLHPFGPFPPPPPTATSHNNTLPHPHSTTRV

SEQ ID NO: 25 - DNA, 21490 bp, Homo sapiens
  CDS (18619)..(19611)
gcttccggccgcggccctggcgcgtggtctgcgcgcgcccggccgtgcgtgcggatgcggggaggctgcgtgtgtgcgcagggagagaacgccggccaccttcccgcttccgagctgggtgcgcgccgagcacaggaggtgagtgagaagggcggccctgcagggtctccgaggcggttgagtcctgccactgggtggagggtatagccaccggacccgcctttcccggaacgcgccgtcctcggaaacgcctagaccccggcagctaggccgggaggcaccgcccactcctctagagcggagcgtggcccaggttgagccgccgcaccgtgggtctcgggtctcggtgacgagcagctgcccgcctccggtgagcgcgggagaaggggcccagtggggcagtgggcgacgcggagggcccaggcccaggccgcggccgcgccgcatccgctggttgtccaccttgccttgccccagggtgcaatacctgccttgcgtcgcccgtgccgctccagccaccgtcaaatccgggtagcgacccggggcgtttgcagcggtgccgaggaagaggacgggaacggtgttacggtattggtgggcccctaacaggcctgcggcgaacgctttcccggagcgctagggaagggccccggcgcagggatgtcggagggattgggaaggaatgtgaaactaagtggggaatgtggagaacgggcggagagagaaggaaatcccacggggctagggctacaggattcctacaggcagtgttaaggaacatacagggcgttttaaaaagattcctagaggtgcaacggagtctcacttttccaagcagtaaggaatgatgccatcctcaagtacgggtagtctttgaattcagtatccgttcgccttcttaatgttggatttaggagggagatttgcagggctttcatgattttgtttcctctgcgttttgcacagattgcctgcgtttaggaggtggctgcgttgtgggaaaagctatcaaggaagaaattgccaaaccatgtctttttttctgttttcagaggtaaggaaaatttgggtttgcagtgttcaactgggaacaagttttttagcttctcccaggaggcttaagcaaaagaagggcgctgaatttgtgctcttagtatgcatgtgtcgatgcctgataaaagcacaaattactgaacgcgtatcagtctggagaacagaatcgtttattactaacagataagagactatgacttttttcccctcatagactaaaatgttcgttcaaatgaatggccattggataactccagacctgaaaataaacactgttgtcaaaacagcatccaggccgggcgcggtggctcacgccagtaattccagcactttgggaggccgaggcgggcagatcacctcaggtcgggagttcgagatcggcttggccaacgtggtgaaaccccgtctctactaaatatacaaaattagctgggtgtggtggcacacacctgaaatcccagttcctcggggggctgaggcaggagaattgctcgaacccgggaggcagaggttgcagtgagccgagattgtgccattgcactccagcctgggcaacagagtgagactccatctccaaaacaaacaaaaaacaaaaaaacagtgtccaagtataatttcagattagagcatgaggtgatttgaaagcgagaagagaggatcaaggcttttccaaaaatgaaaaaagtgttgatatgtaataaatggctccaaaaacaacttgctaagtatacaacattgattttagatgtcataattcctaatgttatgactcatatatatttttttctgttcttctgttcagtagttcacaacagatctgagtgttttaattaagcatggaatacagaaaacaacaaaaaacttaagctttaatttcatctggaattccacaggtaagttcatctacttttaacttataaattatcctaattggttaaaaatgcccataataatgccctttacaaggttttaagtatcgttgatgcagccacgaagtttgttgtatattctagtacgattctttcatcagaggatttgaagaaattcaagagtgaagctctactaagccattttggataatatatttttttcttttttcttgcttgaaaaatagagacaaggccactttatgtttcccaggctggactggaacccctgggctcaaatgatcctcctacctaagcctgcagagtagcgaggacttcaggtgtgtgccacctcacccggctctaataatatatatattttctaaaaaattgaattattaaaataccatggttcttcaggaaaacccaataactataaaaagttaatttggtgggtcatattcaacttcaagttctgactcaattccctttatgcctaagaaaatgctccattgagtactttttctctttcccctttggatggatgatgtctcttcttcttgtgcccagcctccagctttgttccatccaccattggatgatgcaggtagaaccctcttttgggaaatgtctttgtccctttcacaactatatcatgtccagaccaaagaagcttttaacaggatggatcatggttgctcgctatggggtaaactcccactgtgtggtagatagccacatggatggggtcaagcacgtgggatcaaacaggatactcttaatgaccttgcacaacagatacattcaaaagttacagttcatttaacagcaggctgtttggcaaacatctctcttgggactatggacaatgcttttatactaataaaaaattgtatattataaatactgatttgcttttgttaccagtccttttggcatattgtgaattagaggctaggggaagatgagaggatgagctagaaatacggcagtttgtagggggcgcatcagcatggggaaggaagatgaagccacagaacatctgtagggtagggccccaagtgctggaaggttgggagatttggctggggagataacctgcactccttgaatctctgagacattaaggaactaaaagaaagctagagtaggttatcggtttcccaccccatgtatttctgactctgaacacaggtaggtaggtaggatctcattgtctgttgcttctctttctgtgtctgttatctggaactatatttagctattttgtttccagagtttgttttcaagaatggagttaccactttctatgcaaaagcagaatggagtagctgagacagaccctagggccctcaaagaagatatttactatctgccttttatggggaaaaaagtttgcccgcttctgggatagaacatggatttctgctaaactcaagctgtgcattttgaatagtctcataaaagttagaatacacaagtcctcctgttaaaacatttcacaagcctgcagccacctattcctgcagcatgtcatagggctcaaaccatatctcatatctggaattgtatttggctgctattttggttacagactttgtcgttgagaatggagttacgcactttctaagataaaaaattaccgtccagttttatctcttagtattaaatagttcccttctccatactgataacaggctctaaatttatgcctctattgggcactaacacattctgagagtgcaaactcagttccctgctgtggattttggtcactagtttagaaacatttgagctggaaagcctcccccatgttctctaggtgggcctcactcatgatgtttggtgtgaaatgtgtcgttgtgagtcttccaccacgctctgcattgagtgtcggcaacttgaggacagggcttgtctgtctgcttccccactgctgccccaacctctaacacaggtccagaacactgaatgaaggaatgaaataccctcagatgactaaagcaaaggtaattgatggcttaactaagaagaatagtaaagagctgtaatattctcaatttagggtagtaatgggaagaaatgttaactgcagcagctccccgatactcttcctccagtggataaagctctttgtaacaaaacagacacagaaagcccagctttcagggcagtcttgctgctgttctgcctgactttgtgatctttgctctgctccagttttcttagctccctggacccggttgacctgttggctcttcccgctggctgctctatcacgtggtgctctccgactactcaccccgagtgtaaaggtgtgtctgcttctgctgcattctttgctccctgcccaggaatctcaggaggctgtgagattagatgtgaggttggtctctcctggggcactgtgccctggcagaaggagcttggcatttggagttgaagggcttgagtttggattccatgtcttcctctacctgggctgcactgttccctggaaaatgggattgatgttaacacagattttacagtgtcatgaaatgtgctttgtaatttgtagttagaagcactataaacttgtatagtgcccagaagttcactatgcctttaaaaaaaaaaacagccctgctaaaaatcctaacatgtattgcaaattattaagagtgatttttatgttcttattggaatatgcagatagggcagaagcaaaaagaaaattgcggctaaattttccttctaaagtcctgctgcttttgtttgctcctcatttttctcagcccaaacccagaaatccctaaaagattctgcatgccacaacccagaagtctatcagagattcccatatacagggattgttttgcctacaagaaagtagtttgtataacagtatatataatatgtcttacttacatgtgtctttaaaaactcagatgtcttatacctcagcacactgaatgaagcagcaggcttcccttttaatgaagctttaatgaaagacattctcccatacatcttagaagatacctgagggtggtggtgctacaaccagcagagtttcaagggcagaattgggaaatggtaatgagtataggtatttatactcactgtctacctaaaactgtgtgacaactacagagagtggtgctcgaggtgggcttttttcttaaactcagtaaatacttcaaattcattcttaaaaattgaacaatttaaaatatgccaaaatgaaaccttttctatgaactacattttaaacatcaataacaaagttgtggaaccttgtagttagaagggaccttcgacgtttgttagaataacactatctttggtttctcatttgccttctggagtgatacttacatattttattattcaaaataatttgaaagtatctaccatggcacttctaagcttttcttgtctccagaacagaacatccccagatccttcagccacatgtcatgcaatccttatgggagatgataaacccttcaccaaatgagttaccctcttctaacttgttagtgaccctttcaaaatggaactcatatggggctatggaattatgaccccctttgcccagatgcttttccagtttcttgaacctaggagtgtattaggggtgtgtgtgtgtgtgtgtgtgttagagaagggggacacaatctagtattcacttgtagagtttctgttagcactgccattcattcacaagtacttgggagtgcttcctatgtgccaggcactatgctaggtgctggggacacagtgtgcaagaatgaacatcatccctctgctggtagggccagatggtgcctgagaggtatcctagcccaatgtcctaaaattctgttgagaaataactcctcaaattcaatgacttggcctccctgccagaactagaatccttgtttcctgactgcccagttattcctttacttcaccaccttttatcatattggactcatactcagctaaactgtaaggtctgtttaggctgctgttaaaatggccccccatcctgcccttgtgcagctggtttttcgaactctgacataggacaataaatgtgttcccatcaaatttcatcttgctgtctttagctttttctcacctgttaaaaccttttggattgtaattacatcttttaatgaatttgtcattttttttcctgcctacaaaattgaataagcccacgttctttaattagaaatatgaaatgagaaaaggctaaagataggcctgtgatttttttccccagtttgacaaagatgctccagtcaaccttagaacatcagcaggaggacaagtctctggcacttttgtggaacactattcccagagtccagcacaagcccaagaaatgtttcttgaacaaatgactgcatgaaaaatacactggctatgatggatcagccaatttttaagccatctagctactattattactcacattttcccattttgttcagaaggactttaagtgtccagctctctttacagagaagcttgattcttaggtgttacctgcgagttaccttgatcttctattgaagaaccctattgaaaatggggcttaggatagtcaaacagagcattctcagtgaatctcttctagctcctgatggtcattgtgtttgtgtcataagtgttcactaatgtttacagagtctcagcaacttattcagggttatttggaatacagatgcattaacattagtcccttcaggaatttctccattgccaaaaagtgaacttgttggagaggacttgttgaaaactgggtgagcatgatttgcatggaaattggactaaacttccctttctttaaagttcctggtttagccactcgaatagctggcattacaggcatgcaccagtatgcctggctaatttttgtgtttttagtagagatgaggtttcaccatgttgccaggctgctcttgaactcctgacctcaagcagtctgccagccttggcctcccaaagtgctgggattacaggcatgagccaccatgcccggccaaaagtttctcgttgagctctgacaactcttcacctctgaagaagaacagaggtgctgcactgtgaaagtatgaagataccaggccaataggataaaacaaggcaggagggaagcttttgtagtgcagtggctacagactccacttggggtggtgaatatacctgagtttttagtgctgctttgcaggctctgacaccctgactcctgaacaggtgtccaaatttcaagctggttaactgaaagataaatgttataatattggtgcctacttcataagattgcggcagtcatcaaacgaatggaaatataaaacatacttactacagtgccaggaccaagcaaggactattgctaaaattttggagagaggggagtatgaagaaattggatagagtagaaagcaggttctttttaatgtgagcctatttaccctgacagagtaaagcatatttcatttttaagtgttatcaaattaagcagatataccaattgctattcattcattcagtaaataaaatttcacttcctattatatgtccagctgtatgctccaaagtaaggagaaaaatgtaaaccatatcaaatatgcacaatcctcaaagtagcctgacaccacttgaatatcacacgcactacagctggaaaaatttcttgtattttgcagctctcctccagctgctacaagtgcctatggtgagacttttgacagtgtgagtggttcccagaaaaaatgatgttcagttgtagaaagaccatggggcagaaagaaggatcccaggagaggggagcacatgtgcagaggcggaacccagaaatgtgcgtttggctttgtggacctctaccagtagttctttggggctcgtatttgcaggatagcagaacatcaggcactgggagattctaggaaaacagaaaccttggactctaggagaagacttactgatttggaaggagaaggtggatccactaagatttatttgcatgtttaattgtattacagagcatgtcatgccatgtaagacacatttgggagttaggagcaaggtttgtaaaggaaatgtagacaaataatatatgtagaggaagcatatagtgtggactctaataataacagcaataccatctacttagcccttactgtgtgccagccccatcctagatgtttagcgcgtattatttcatgtagctctggcaataaacccgcaaagaaggtattattgctcccattttacagataaggtaactgaagcttaaaaaggttgagtaatttgctcaagtggatttcattgcttctcaaacttcagtatgtccacaagccacctgttaaaaatgtttctgattcactaggtctagggtggggcctggggctttgtattcctaatacactcctaggtggtgcccatgcactttgagtggtgagggtctaggcatcacattcaaatcacctgggagctttaaaaatactgccacctggtgctcgctttggcagcacgtatactaaaattactgccacctgagccctgccaccctctgaaactctgatttagttggcctgggatcccgcttggcttccagtatttttcaagttctccaggagattataatgtgccgcaaagtgagaaccactgggttaaagaagaggggaagaaaaagtagtggtcagatggcactggttgtgtttatttctaatataatcaggggagggcctcaaacacaaagcagcagtgagttgtgaaaataattagatgtttaattgacaagtctaattgaatggtagagttttatattgctttatgagttaatgtgtttagtttgaaagggtagtgggggaatttccctcaaagatgtgaattgatagttattttccctttataaggaatatacatgattggtgtaatgatgatttgaattaaacttaatatgcacaggacctttttttaggcaattaagatttccactccctttgcagtattttatgtagaagaaaagttagaatgttgcaaaactgacagtagtttggtaattatctataatagttagcatatggatgatcctgactctagcgtgcttggacctaaaatttaactgaaatttgtttcttgtttttttggaccttttaaaatgcacatgatcagaatcagcatagcctattacaataaggttttgttattagaagacagctgaagaaaaacataatcaacaaattcaggttacttttggattcagcttattcttaggaatatttactaagtggataaaagtacattaccaaatcatttgcaaagtatgcaaatattacagagagcctactatgtgttagacactggacatatagcagtgaataagtggggtcaggttttccctctctccaatcttatattcttttgaagggaatagacaataaacaaatagaaatagatttttaaaagtctagacagggttaaatgctgagaaggtgttaggtttaagtcccagctgaggtccaacaaggtgttaggtttgagtcccagttgaggtccgaggggagtgggtggatgggcgaattgctgaaagaacactcggggggctttaggcaggtgaaatgtagttttattcagcagctttttaatcagcagcttcctcacactaactgtttctcacagtttctttatcttggctgtttgcttcagctttgtggctcctcttatgagcctgctcctgctgcccccagccttgcagctgcactccctggcctatactaccagggttagcagcttaattttttccctctgggcataagtccccacttcccgccttcaaggcaatccactcttccttacaggggtcagtagcattactctctctgggcattagtgcacctccaagccatgtcaagccaacccaaaccccatgggcagcatcagcagggcagttataccttttacaaacaatagcaactcaaagccaagtataaacttacaaagacaggttatctaacaagtgaagtatgcacctgtgccctaaacttgctaagtcactttggcccagatattcgccttagcctattccttaaccaaagcacattcatatactttatggaagggaataatgagggatgtgatagaaaataagtgctgggggaactacttgagataaggggtcagggaaggactctcctaagtgacactgtgctgagatgtgaggcatgagaaggagccagcctttccaacaaccagctttttggttggaggggcagagtaagtgcaggctctgcaagagaggaaaatagttgacatattcagggataagaatgggagtcaggccgggtttggtggcccacatctataatgccagcactttgggaggctgcggtgggaggattgcttgagtccaggagttcgagaccagcttgggtaacatagcaagacccccatctctatatatttatatattttttaattaaaagattaaaagaataaaaaagaacggaagccattgtggttgaaataggattgggagggagtagttgtagcagatgaaagaggggcttatataaacccatggagccagaagacttgacagatcttcataaaaaatgtgaacgttgttgcccggcattgtggcaaatgcctgtggtcctggctactggggtggatcacttgaggccaggagtttgagtctgcagtgcaaaataattgtgcctgtgaatggccactgctgtccagcctgggaaacatagcaagacacatctctaaatttttttttaatgttaatattgttatttttaagcttttattgtctctgtgctcttctggcattccctaaattttctctaatgaacatatattacatttgaaattagaataattactttttaaataattacatttgatttctttttgcaggaaatagccaacatttttgcaccccaggaaagagtttcaggttattttggcttaaataattgtgccattgtagtatctctgtttgtctgttttcctggaatctttgcatttaaacactgatacctccatttattttctagtgacgtccagtatgtttttggtgttaaataaaaaggtgtatatctgcatgaacaattagttactgttcttgttaaaaatttgtatttcaggttttaagggtaggaattttgagtcttccttgtgaaaatgataaggctgtgatgctgccatactgtttatatcaaagttcaatggttgcaagaaattaaaactcaaagcagctctggtcagaagagctccttagcataggaagcatagtgagcaggcagcacactccctgggatctagcagccaagaatgtgagatctggagtcttgtttgagtttgtctctaccacttacaacactggaaactgataaccttttttatctttggaggttttctgagcttttctagtatttgagatgttttttcagctgctgcagatcaacccctaaatcaacaagtaattactggtggcttgctgttcacccagcattgcactaagttggtgggatagataagatactgtttgcttaatggaaattgcttatagttggcaaattcatatgtagttaatataagcacaagtttatcttaaaattttttttttttatctatggggtctcactgttccctcaggttggtcttgaactcctggcctccagcgatcctcccgccttagcctcctaaagtcctgggattataggtgtgaaccacagtgcctggccacaagtttatcttttagaaaatggaaattatttttaagttataatttctttcttgacagtgatgtgtggcatttaagaagtcagtaataaaataatagtgtacttccctgttggggcttttcatattgttttctattcgtcaatattgttgattcttctctccgtccctcccctgggacatgggatttagaacagtgtcggggtccttgtagcccactgctcagctgtcctaaggaggcaggccagctgccctgtgctctcactatcaggaaatgagccaatccgagatctctggccagtttgatttctatgatacacacatgctatgaacacagaggccacttcaattgagcccttatttatctacatgcctgagtatcgttttaaaaatatttttattgattgataagtgtacatatttataaagtacatgtgatattttgatacatgcataaatgtgtaatggtcaaatcagaaattcaggatatctataacctcaaaaatttatcatttctttatgttgggaatattcagaaaccattaagtgctcttggtcctggaccaggccctgtgctgactggttaatccaagttctttccattaaacctcacaataattagttttgtgatgcctgatttatagctgaaaaatgaaacttttggcctggtgcggtggctcacgtctgtaatcccagcactttgggaggccgaggcgggtggatcacaaggtcaggagatcgagaccatcctggctaacatggtgaaaccccatgtctactaaaaatacaaaaaattagccgggcgtggtggagcacctgtagtcccagctactcaggcggctgaggcaggagaatggtgtgaacccgggaggcgcagtgagccgagattgcaccactgcactccagcctgggcgacagagcgagactccatctcaaaaaaaaaaaaaaaaaaaaagaaaaatgaaacttttgagaaggtaactaacatgcctaaggtcatacaactagtcattgttgcagtcaagatttagggtggattggctctgatatccaaagcatttttattatgcttttttcctgtttgttttaataaacttaatatacaaagaaaactgtaaatattagagaacacctatatttccatcgccctgaattagcagctgttaattacagtacagtatttatgaccagtgtttttttccccctttaaccacatgttcctttcattcttcctgctgataggtgtggtatgttttcctgtagtcccattagaaaaaaatcattatttatacgtagttgcttctaaaggttcatcacttcttgtgtgtagttttagaatttttataaatgataatttatacatatatcattatgtaacttgtttatactcaacgttttatttctgagagttaaattgatgttctgtatacaaatccaattcatttagctatcatataggattccattggaagacataccaacttttatttattatcttatggacatatatttatggatttgattgctttcttgtgatgttccttagcttttctttctatcctctgtatttcttgtaaaatttgattagattccagttaaacattacattgtatctcattaggagatacataataggtgtttgttccatcatttatgatgttacgattaattattgggttagaatggtgacaccctgatcctccaatgtaaagtttatattttttcagttcttgcaactaaaaagtaatcttcgtggtgttactttggcatcatacagatagccaattgtccatcaaccttttatttattatcaaaactctgatgtataatcatcatcagtaatttcatgaaagattgcaaaatgacagttttcttattctgtcattccatctatagtagtctctgcttatccatgggggctgtgttcaacagcctgtcccccaaacatgcctgaaaccatgatagtaccacaccctacccaaagaatgccaaggtcaccttttcacttaaaggaagcactttgagcttctctttgacctatctgaagtgtcagcatcctacttttctgccttggggccattattaggtaaaataagggtgacttgcacacaagtactgagataccatgacagtgaatctggtaactgagggctcctatgtgactaacaggtgggtagcatatatagtgtggatacgctgggaagagggaggattcatgttctacctgagacagagaaggatggtgcgagattttgtcatattactcagaacagtgcgcgatttaaagcttatgaattgtttatttctggaatttttcacttaatatttccagactgtagttgactgtggataactgaaactatgggccaggaaactgcaggggtaatttctagacatttctaattggcatttttcttttaaaaatttttaaattatttatttatttatttttgaaacggtcacgctttgtcacccaggctacagtgcagtggcacaatcacagctcactgcagcccggacctcccacacccaaaccatccttctgcctcagcctcccgggtagctgggaccacaggctcatgccaccatgcctggctaattttattattcttttgtagagacagggtctcactatgttgcccaggctggttttgaactcctggtctcaagtgatcctcccaccttagcctcccaaagcattaggattacaggtgtgagccatgacacccagcctataagtggcatttttctataaagaagagctttttctcttcaattagagctatttgcttcctctgaactatagatgattgattctttaaagcaggaaataaaaaatgctgtctttcctccatcatcccagtaattttcaagtaagagattggtatagtagctaccgagttgaaacattttacattgctcatgtgcagtgcagatatggtgttctctttaaatttatggatgaaacaaattgtgtatataaggattttgagcttctaaacaattttttttttttttaaagtagagatggggtttcaccgtgttagccaggatggtcttaatctcctgacctcgtgatccacccaccttgggcttctaaacaaatttttaagaaattttatggtttttaaattttttaagtgttttccatattttttgcaattgatttataattatgctgtggttagagaatgtagcctgtattattgtttttaaaattgttgagaaggcttgtattacctaatattattagttttctttttaaatgtgttatgttgtcttaaaaatgaatgtttctattctttttattggatgaaaggtactaaatgtttcatttgatcaagattaataatattatttgaaacattcatatccttttttatctgcttgatgtatcagttacttagatgtattaaaaatctcccattaggattataagttttcccatttatacccatactcttcaggttttgctttatatattttgatactgtgtttttatggttatagagcttcatgattgttaaattatctttttggatggtttcttcttacagagctttatgataaagtatctttttggatggtttcttctgttagtaataacatctcctttgtcccttattaatgatgtttgtttatttattttgagacagtcttgctgctctgttgcccaggctggagtacagtggcaggatctcagctcactgcaatctccgtctctcaggtttaagcagttctcctgcctcagcctcccaagtaggtgggactacaggtgcgcaccaccatgcctggctaatttttgtgtttttagtagagatggggttttgccatgttggccaggttggtcctgaactcctgacatcaggtgatccgcctgccttggcctcccaaagttctggaattacaggcatgagccaccatgcccagcctgagagtcttttttttttagtagataagtttacatttacatttaccttaattaacagcacatttatatttattcctgccatcatcttttgcattttgtgtttgcatgcattttttctttttatttcccgttttcctaccttatattgaatagacagataacttaatttgtgtcttctatttctcaatcaatttggaagatagtgttctatatttgttctttcagtgatcaatgtaaaggttaatgtacattcttaaatgaagtttttagcaaaatgtgaaggtttattcatatctctttgttaaaatatactaagaatgttagcatattttacttttcctatgaaacatctttttgtagccatcatgtcatttttacctagtattttagttacattttttaaccacatgaaaaaattttttgcccctccctccttttcaggataatctattttgacagtaagaatcattttagagaacacaaatagaatggaaatgatgccaagggtagaaccacagctgataataacagcttctgtttgttgaatacctaacacaggccagaagttttgcatatattatcactaatttgcactatattaatatcttcaatatagagacaggaaactgaggcttcaagagatacataacatacccattcatcctggttggtaaaggacagagctggagagtggactttggtggctggctttggagccacctgtgttgtaggtgacctagtctgttctggccagttctttagagtccgttccttgcttttggactagatagtttctcctctttttgctgctgctttattttattcatgggtccataaatgatagacatcataaccatagtcacattctcacatttagaaactatggcttatagaatgtgcaaaaaataacttttataataagatttgccattttaagttcttcccattattgaagagtagtagggcccccatcatccatatgcaattataaatggcacctcttacaacacttgccttctgtttttccaaaatctgttgaaatatgctgatttgttagaatgagatatttgttgtcataaatgtacaagtcgttagtggctgagttgtaaatggttccctcaagggttgcgtagtgcccagtagccaggtgaggagaaaacgtataaaggcagtgttaattactttcataattcttgctctcaaactattccatttcaggtttttttctgggattggcagtgtatggcaagtaaaggggataggggaggataggaggtgggtggacagatctatattttatccttttacaaatggagatagcatatcaagcctcagtgtccattgcactcctgctgtaggcctccctttgtcttgcactttgactcctgagagaaaaattgtttttgccaacaaggtcatagaatgtaagtggagaggcaagacacatatacgtggaaccaaactggagagagtttgctaaaacattacattgcgttgtgtgggttaaaatatggaaagcattacatatagaaaagataattgtggtgagacgtaatcagggcaggtaagagatgaccagatgaagaggacaaggagccttgaaatcctgttattttcatatgtattaagagacagaggagctgtatgtccagagaccctaaagttgacccaaggtagaacccttggtagactagccttcccataaggacattaatgtctgtcctccatagttaattccagctttccaagaaccctcccccatataattgtgggtaaaagggcacctgccagcagcctcctcagcccacccttcctcatgttgttcatctgtcccttatgctaaagttccttagcatttgatgtaaacagtgtgtactgcactgtgctgccatgtttatacgttgtcttgggatttcttctttctcccgtctcctacttcctttggtctccttagtgcctggtctttggaagcagatgtccagtaaatatacatacatgaatgcccttagactgaagtctatgctcatggtgcaaggaaagctctatggaatcccgaattataaaccaccctctgccttgagatcaggaacagagctgtcacttcacaatctgaatgttctgtgcctcctcttgtctcagctggagcttctgtgtaaaagcaagtgttttaggagtttccatcccatgattctgattgggtgtgtgatttctgaagaggttggaatgggaaatgtgaaaacttaatactaaggacgggcctttgatttaaacagttgctatgcagactgagcattgagtttaaccaatgaggtaaaaggaggggagaggtggtgtttggggcaggtaaaagctgtttcatagtcagtgtttgaaaactcaagagagatgatcctatttgtgtctggaggacttgcctttcaggtgaagaatctctgccttatcccacatcagcagtcactaagaatagaataatgatcactatagggtttttcttatccagatttgctagaatccgtatcagaacacacagctgagaaagacccttcgtttatttgggcatgtggctagtaacatccccttgaattaaatccttctttttttatagttataaagaggagatacattttatttatttgtttttatggtagatttattttttaacccatcattacccatctctttctgtccctatcatatctgcacctaggatagaattatatttaacagtaaactgttaatttaggtagagtaggataactactacaaaataatcaaaggatatgttttaaccttggtcttgatgtaagaagctaaaatagatttttggttattggtttctatttgcttacagttaaatgaagtagattcaagtcaggattttttgttttactctggagattctgttctcctactctttctccttgagtagatagtcagatgtcttttgaaaatgtgttttcggtgtggaatattaacccaatctttgataactcttccagaaccttcggctcgcgtgcttctgagctgctgtggatggcctcggctctctggactgtccttccgagtaggatgtcactgagatccctcaaatggagcctcctgctgctgtcactcctgagtttctttgtgatgtggtacctcagccttccccactacaatgtgatagaacgcgtgaactggatgtacttctatgagtatgagccgatttacagacaagactttcacttcacacttcgagagcattcaaactgctctcatcaaaatccatttctggtcattctggtgacctcccacccttcagatgtgaaagccaggcaggccattagagttacttggggtgaaaaaaagtcttggtggggatatgaggttcttacatttttcttattaggccaagaggctgaaaaggaagacaaaatgttggcattgtccttagaggatgaacaccttctttatggtgacataatccgacaagattttttagacacatataataacctgaccttgaaaaccattatggcattcaggtgggtaactgagttttgccccaatgccaagtacgtaatgaagacagacactgatgttttcatcaatactggcaatttagtgaagtatcttttaaacctaaaccactcagagaagtttttcacaggttatcctctaattgataattattcctatagaggattttaccaaaaaacccatatttcttaccaggagtatcctttcaaggtgttccctccatactgcagtgggttgggttatataatgtccagagatttggtgccaaggatctatgaaatgatgggtcacgtaaaacccatcaagtttgaagatgtttatgtcgggatctgtttgaatttattaaaagtgaacattcatattccagaagacacaaatcttttctttctatatagaatccatttggatgtctgtcaactgagacgtgtgattgcagcccatggcttttcttccaaggagatcatcactttttggcaggtcatgctaaggaacaccacatgccattattaacttcacattctacaaaaagcctagaaggacaggatactttgtggaaagtgttaaataaagtaggtactgtggaaaattcatggggaggtcagtgtgctggcttacactgaactgaaactcatgaaaaacccagactggagactggagggttacacttgtgatttattagtcaggcccttcaaagatgatatgtggaggaattaaatataaaggaattggaggtttttgctaaagaaattaataggaccaaacaatttggacatgtcattctgtagactagaatttcttaaaagggtgttactgagttataagctcactaggctgtaaaaacaaaacaatgtagagttttatttattgaacaatgtagtcacttgaaggttttgtgtatatcttatgtggattaccaatttaaaaatatatgtagttctgtgtcaaaaaacttcttcactgaagttatactgaacaaaattttacctgtttttggtcatttataaagtacttcaagatgttgcagtatttcacagttattattatttaaaattacttcaactttgtgtttttaaatgttttgacgatttcaatacaagataaaaaggatagtgaatcattctttacatgcaaacattttccagttacttaactgatcagtttattattgatacatcactccattaatgtaaagtcataggtcattattgcatatcagtaatctcttggactttgttaaatattttactgtggtaatatagagaagaattaaagcaagaaaatctgaagtattgtcttgtttttaaaaaatacagttcctagtgtttttagaagtcacttaatttgtctcatttttccacctggaaattaggaataatgtagaatgcaaggcagtaatttccttttggaaaggactctgaaggcagaaaagaagggagagaacctcatgggcagaatattataaaaagagtgtcatattccagcatttgaattggaaagagaagagtgaagatccaagttgcattattaatctgccctgtgttttttccttttaacaatcagtttgagctgctgctgttatgagtttctcatcaagatgaaagccctaatatgtaaagtcaaatccgatttaaattttgtgcttttatagaaagaaatttcttcatagacgtggtgatatatcatttgttggacctgctaatagtaggtcaaaggggagcactccttgccccctgttcctgggtttatgcagttttctttttagagtttatatagggcaagtggttctttttctctgaattacaggatggaaaaaggtcatatcctttgtcaggaaatataaacttgaaagtatgtagtcagctcttgtaatactcatatttatgattgtcctatatgaaaaacaacttcagttaaaactataatgtgtgattctgtataacaaggtgatgtctgtttcccagggctcagacctaatccagttataataaaatcaattaaatgaaatattctatagaatcgatctatgcccttgttaatctccatccatataggagtcacgttctttaagacagatggtggtagttatttttgtggcatggttagatttgactggttttgcagaagattacagttatgtactgcataatgacatatacaatagtggtcccataaaattataatggagcagaaaatctattgcctcatgatgttttagccgttttaatgtcatagcctagtgcattactcacgtgtctgtggagatgctggtgtaaacaaacctactacactgccagttgtataaaagtacagcacattcagttatgtacagtatgtaatactgataatgacaataaatgacaccggtttgtgtatttactttttataa

SEQ ID NO: 26 - protein, 331 aa, Homo sapiens
MASALWTVLPSRMSLRSLKWSLLLLSLLSFFVMWYLSLPHYNVIERVNWMYFYEYEPIYRQDFHFTLREHSNCSHQNPFLVILVTSHPSDVKARQAIRVTWGEKKSWWGYEVLTFFLLGQEAEKEDKMLALSLEDEHLLYGDIIRQDFLDTYNNLTLKTIMAFRWVTEFCPNAKYVMKTDTDVFINTGNLVKYLLNLNHSEKFFTGYPLIDNYSYRGFYQKTHISYQEYPFKVFPPYCSGLGYIMSRDLVPRIYEMMGHVKPIKFEDVYVGICLNLLKVNIHIPEDTNLFFLYRIHLDVCQLRRVIAAHGFSSKEIITFWQVMLRNTTCHY

SEQ ID NO: 27 - DNA, 3851 bp, Homo sapiens
  CDS (62)..(1783)
ctctcccaaccgcctcgtcgcactcctcaggctgagagcaccgctgcactcgcggccggcgatgcgggaccccggcgcggccgctccgctttcgtccctgggcctctgtgccctggtgctggcgctgctgggcgcactgtccgcgggcgccggggcgcagccgtaccacggagagaagggcatctccgtgccggaccacggcttctgccagcccatctccatcccgctgtgcacggacatcgcctacaaccagaccatcctgcccaacctgctgggccacacgaaccaagaggacgcgggcctcgaggtgcaccagttctacccgctggtgaaggtgcagtgttctcccgaactccgctttttcttatgctccatgtatgcgcccgtgtgcaccgtgctcgatcaggccatcccgccgtgtcgttctctgtgcgagcgcgcccgccagggctgcgaggcgctcatgaacaagttcggcttccagtggcccgagcggctgcgctgcgagaacttcccggtgcacggtgcgggcgagatctgcgtgggccagaacacgtcggacggctccgggggcccaggcggcggccccactgcctaccctaccgcgccctacctgccggacctgcccttcaccgcgctgcccccgggggcctcagatggcagggggcgtcccgccttccccttctcatgcccccgtcagctcaaggtgcccccgtacctgggctaccgcttcctgggtgagcgcgattgtggcgccccgtgcgaaccgggccgtgccaacggcctgatgtactttaaggaggaggagaggcgcttcgcccgcctctgggtgggcgtgtggtccgtgctgtgctgcgcctcgacgctctttaccgttctcacctacctggtggacatgcggcgcttcagctacccagagcggcccatcatcttcctgtcgggctgctacttcatggtggccgtggcgcacgtggccggcttccttctagaggaccgcgccgtgtgcgtggagcgcttctcggacgatggctaccgcacggtggcgcagggcaccaagaaggagggctgcaccatcctcttcatggtgctctacttcttcggcatggccagctccatctggtgggtcattctgtctctcacttggttcctggcggccggcatgaagtggggccacgaggccatcgaggccaactcgcagtacttccacctggccgcgtgggccgtgcccgccgtcaagaccatcactatcctggccatgggccaggtagacggggacctgctgagcggggtgtgctacgttggcctctccagtgtggacgcgctgcggggcttcgtgctggcgcctctgttcgtctacctcttcataggcacgtccttcttgctggccggcttcgtgtccctcttccgtatccgcaccatcatgaaacacgacggcaccaagaccgagaagctggagaagctcatggtgcgcatcggcgtcttcagcgtgctctacacagtgcccgccaccatcgtcctggcctgctacttctacgagcaggccttccgcgagcactgggagcgcacctggctcctgcagacgtgcaagagctatgccgtgccctgcccgcccggccacttcccgcccatgagccccgacttcaccgtcttcatgatcaagtacctgatgaccatgatcgtcggcatcaccactggcttctggatctggtcgggcaagaccctgcagtcgtggcgccgcttctaccacagacttagccacagcagcaagggggagactgcggtatgagccccggcccctccccacctttcccaccccagccctcttgcaagaggagaggcacggtagggaaaagaactgctgggtgggggcctgtttctgtaactttctccccctctactgagaagtgacctggaagtgagaagttctttgcagatttggggcgaggggtgatttggaaaagaagacctgggtggaaagcggtttggatgaaaagatttcaggcaaagacttgcaggaagatgatgataacggcgatgtgaatcgtcaaaggtacgggccagcttgtgcctaatagaaggttgagaccagcagagactgctgtgagtttctcccggctccgaggctgaacggggactgtgagcgatccccctgctgcagggcgagtggcctgtccagacccctgtgaggccccgggaaaggtacagccctgtctgcggtggctgctttgttggaaagagggagggcctcctgcggtgtgcttgtcaagcagtggtcaaaccataatctcttttcactggggccaaactggagcccagatgggttaatttccagggtcagacattacggtctctcctcccctgccccctcccgcctgtttttcctcccgtactgctttcaggtcttgtaaaataagcatttggaagtcttgggaggcctgcctgctagaatcctaatgtgaggatgcaaaagaaatgatgataacattttgagataaggccaaggagacgtggagtaggtatttttgctactttttcattttctggggaaggcaggaggcagaaagacgggtgttttatttggtctaataccctgaaaagaagtgatgacttgttgcttttcaaaacaggaatgcatttttccccttgtctttgttgtaagagacaaaagaggaaacaaaagtgtctccctgtggaaaggcataactgtgacgaaagcaacttttataggcaaagcagcgcaaatctgaggtttcccgttggttgttaatttggttgagataaacattcctttttaaggaaaagtgaagagcagtgtgctgtcacacaccgttaagccagaggttctgacttcgctaaaggaaatgtaagaggttttgttgtctgttttaaataaatttaattcggaacacatgatccaacagactatgttaaaatattcagggaaatctctcccttcatttactttttcttgctataagcctatatttaggtttcttttctatttttttctcccatttggatcctttgaggtaaaaaaacataatgtcttcagcctcataataaaggaaagttaattaaaaaaaaaaagcaaagagccattttgtcctgttttcttggttccatcaatctgtttattaaacatcatccatatgctgaccctgtctctgtgtggttgggttgggaggcgatcagcagataccatagtgaacgaagaggaaggtttgaaccatgggccccatctttaaagaaagtcattaaaagaaggtaaacttcaaagtgattctggagttctttgaaatgtgctggaagacttaaatttattaatcttaaatcatgtactttttttctgtaatagaactcggattcttttgcatgatggggtaaagcttagcagagaatcatgggagctaacctttatcccacctttgacactaccctccaatcttgcaacactatcctgtttctcagaacagtttttaaatgccaatcatagagggtactgtaaagtgtacaagttactttatatatgtaatgttcacttgagtggaactgctttttacattaaagttaaaatcgatcttgtgtttcttcaaccttcaaaactatctcatctgtcagatttttaaaactccaacacaggttttggcatcttttgtgctgtatcttttaagtgcatgtgaaatttgtaaaatagagataagtacagtatgtatattttgtaaatctcccatttttgtaagaaaatatatattgtatttatacatttttactttggatttttgttttgttggctttaaaggtctaccccactttatcacatgtacagatcacaaataaatttttttaaatac

SEQ ID NO: 28 - protein, 574 aa, Homo sapiens
MRDPGAAAPLSSLGLCALVLALLGALSAGAGAQPYHGEKGISVPDHGFCQPISIPLCTDIAYNQTILPNLLGHTNQEDAGLEVHQFYPLVKVQCSPELRFFLCSMYAPVCTVLDQAIPPCRSLCERARQGCEALMNKFGFQWPERLRCENFPVHGAGEICVGQNTSDGSGGPGGGPTAYPTAPYLPDLPFTALPPGASDGRGRPAFPFSCPRQLKVPPYLGYRFLGERDCGAPCEPGRANGLMYFKEEERRFARLWVGVWSVLCCASTLFTVLTYLVDMRRFSYPERPIIFLSGCYFMVAVAHVAGFLLEDRAVCVERFSDDGYRTVAQGTKKEGCTILFMVLYFFGMASSIWWVILSLTWFLAAGMKWGHEAIEANSQYFHLAAWAVPAVKTITILAMGQVDGDLLSGVCYVGLSSVDALRGFVLAPLFVYLFIGTSFLLAGFVSLFRIRTIMKHDGTKTEKLEKLMVRIGVFSVLYTVPATIVLACYFYEQAFREHWERTWLLQTCKSYAVPCPPGHFPPMSPDFTVFMIKYLMTMIVGITTGFWIWSGKTLQSWRRFYHRLSHSSKGETAV

SEQ ID NO: 29 - DNA, 11733 bp, Homo sapiens
  CDS (39)..(41)
  CDS (3744)..(3987)
  CDS (9356)..(9504)
  CDS (10370)..(11311)
tcattactacagggcaggaagggcacgttctcatcagcatggtaagtgactacacgcctatgcattgttgtaggaaattttactaatcatatttggcccttttcccacagcaaacaattcttaataaaattgtaatgcaagagaagacatttgtaaagaaacatttgtttctttcaatgtccaagtagatgagttgggagcagatgtggacaggctgtaatctattcctctgtaatgttgcttctttcaaggtaaagctcagttgatttgcagtagctcactgccattaattgaagcactgaagcaaaaacctttccttcctttagttttcacctttgttttaggcccagagtgctgatttttctgtagatattcattgcttcacttttcgttaggctgttaagagtttctgaggacttcagacttaggtaaccgtggctaacctcataaatgcctggcagggtaaagtgcgcagacatcttctttgccctcccttgagtttagttctttgggcaccacaatgaatagaataacttacaataattctgttttgggatgaccttttcagatccatttgccctttatttttttctgtgccagtttttcagtatctttgaatttttaattcttcaatggaagcaacatttcgaactgcttcttgatctttgatttctcaccccattggtctctctgtccaacatttaaaaaattttaaattgttttgcttttaaaaattatgcctttcaacatgagagagacttgtgataatagcatgttctgtatcttatcactgtcaacattctgggtgtgattttgtattatggtcttgcaagatgtttccactgcgggaaatgggtaacggatgcaagggatcttcctatgttatttctcacagctgcatatcaatctacaaagacctcaaaattgaaagtttaactgagagttatgcttttctagtaattcaaataatccttatagcagcgtttaataatgtgctatgacttatcagtgttgacgttcagtggacattttatagtcttctactttatagtgtgactaatattttcatagagaatttggaaaaaaagggagaggctaagagaagaataaggcaaagatagtcttctacacccttggacagagttatgttataagctaagctccttcaaagacgaaggatgcttgttagtccaggctattcgtgctgatttcaaaaagaacagcatcactctgctttctgagtcacttgaacagaccacgtgaagaggaacaatcttttttttttttaatgttagtgattatttttactgtgactattatgaacaaataccacatgtacacctgaattttactcgtcactgtaacacaggactgggtggtagccagtggagaagacagagaaatctacatgtaaactttacaaagtaagaggttttaatgatgtagaaacaatgaacgttcaccctctccttttaaaatgttaacttaaatttaaggagccaagttttgatcagattacagcagctgatgtatttgcagcactttaagtccgacagaaggggagaggaataagattaaggttatctgaagcctgataaggggtattcgaagcctgtttataacagaatatgctgtcttgagaggtggaatattagtttgtcctaaatgaagtgctttctaaattagagagactgatagttgcacagaaaataaacaagatggaagccctactaaggtagtgaacttgaattggtcatgaagcagagggctgttatgccttgtgaatcacagagacaaagtacaaaggtttgatgccattgagcatgaacagagtccaagtcagattgcaggggtgtggccgaccagagccctctccttactttcctctgactagtggtctgtgtagaccagtggtcctcaactttttggcaccaggaaccagttttgtgggacacaatttttccatggagtcggcagtggggatggtttctggatgaaactgttccacctcagatcgtcaggcattagttagattctcataaggagcacacaacctagatcccttgcatgcgcagttcacaatagggttagtgcccctatgagaatctaatgctgccgctgatccgacaggaggcagagctcagtcagtaatgctcactcacctgctgctcacctccttctgtaaagcccagttcctaacagggcacagactggtactggtctgtggcccgggggttggggacccctgtgtagaccacaggtgagggattgacaggaggcctgaggtctttcagtagttgaatctcaggctttagggcagtgtagccatgaacaagggcagggctcccctcagcttatctggtcaaacagcccaaagggtcctgatgatgcagaagacatgggggtctcattctacaagaccctctaaatagatttgtttcagcaccacagtcaatcaaaccacaccaatattaagaacagcgattgctatcacctcagatttcttagaatttagcttttactttccttctcattttttttctttccttctcttaaaaacgtagatcattgtctgtttaacagaatagttgtttgccttaaaaaaaagatgatttaaagtgggatgggggaatatgaaggtggaagaaatagtaaagtttagacaagaaaataaaatcactacccagatattactaaacttaatatcttgatgcattttcttttagatttttatgcctatttttgaacatattggacatcatactctatatgcaatcatgcatcttatgtgctttttacttaatatgttatcataagcatttcccatgtcataaatcttttttttttgggaaaacgtttaagggttgcataacatgtcattgtgttgatgtaacatcctttaaatgctcaacaatatataaatggttagattaaatagattggtttttggttttcatgcttatgaattgtgatgcttgtgaatgccatcagcctacatccttgcattttagagtctttcttttgtaatttgtttgtttatatcatttgcctagctagtggatgtcttaagtgtttttttttagaaagttgatgtatataaaatcaatttttatctctatatgtttgttataaaacttttacattttggaactgttaaatctattgcattttgccttgtaaaatttcccactagttttaagtttagtatatccatccttattcagagtgcatatgaatggtaaagataacattttaaatttatctgcgatgagttttagtacttgacaaggctatatattgattttagttttatttctttccaataactagctaattttatttctagacaagcccacttgatatatataactacacgcacacacacacacacacacacacatctcacctatattgaaagaataaagtaaaattagttgtattttgatttgcattgtgtgtgtttgtcttaattcaattcttagccaagtacagagtaggtgcttaatttatgttgttaaaataaactttttaatggaatttaaatcccaggtttaattttccctgaagcttagctgtaccctgggtcttggtttccatgaaacgcttttgattatccttataacacattcctccgtggccttaagctagcttggtttctgtcatttgtaaccagaagggctgagtaacagatctcctgttttctaaacacctgctcagttccaactcaccatgacttattttagagggagtgcctttccatccacatcggtcaagctggcatccagattggggacgcctgctgggaactctattgcctggaacatggaatccagccaaatggcgttgttcttgacactcaacaggatcagctggaaaatgcaaaaatggagcacacaaatgcatctttcgataccttcttctgtgagacaagagctgggaagcatgtgcctagagcactcttcgtggacttggagccaactgttataggtacaataaatgttccattctagcatacttaactggagccacactcaaacaaatcaagtggatgggattagcagattatacaggtctatctgaatggaatcacatggacctttcccaaatgtagaggcttactcagtggccatgggtgattaacatgacaaacacacccaaagggaagaccagattagtgtttttgaatttaaatttatttatttatttattttgagatgagtcactcaggcaggagtgcagtagcgtgatctgggctcactgcaacctccgtctcctgggttcaagcaattctcctgcctcagcctctgagtagctgggattacaggcacacaccatcatgcctggttaatttttgtatttttagtagagatggagtttcactatgttggccagactggtcttgaactcccgacctcaagtgacccacctgccttagtctcccaaagtgctgggattacaggcgtgagccaccacacttggcctaggttagccttctttacctgtgtgatgaaatgaattaagacctgctaattgatccacacatatatcataatagaacactaagtcttttcctgggtttgagagccatttgctagaaggcactggcaaagaatcaaaaagtttttcgatagctgcttaaaaagagtagaatatttgaaaagaatcctaaaggaaaaagaggccaaatatataccctagttatgggaaaaacagtacaattttatgattactaacaatagacttgtagtatgtcatgcaaaaactcttgaaatggagctagaaaaataaaggagagagaaggggctcttactgacttaagagaaaagctagacagtggggtagatttgggtttgatgttgtgcatcccattatttgttggcgtgtaataaacttcccctacatttagtggtttaaggcaataatgattgctggtttgttcatgaatctacagtttgggtggggctcagaggtgacagctcgcctgtgctccatgtggtaccagcttggaaggctcaagtgggaactggggcatccactttgaaagtcactcatttacatcgctgccccttggtgctggctgttgactgagagagtgggaggggtggagaaaaggagaggctgacgaattcaaggtcatgataagaaggaattgaatacaaccccataaacacttcagctgggtgatagaagtacaaagatgaataaatgttgatttttgccttcgacgtgaagatgcctgtcttggtcaactcggactgctgtattggaacaccatggacccggtggcttagacaacagttgttgatttctcacgattctggaggctggaagtctgagaccagggtgcctggtggttggcttctggtgaaggctctcttcccagcttgcagatggctgccttctcactgtattctcatatggcagagaaatagtctgtgtctcttcttataagggccctaatcccataatgaagtctctacccttatgacctaattactcacaaagactcacctccagataccatcacatcagggattagggattcaacgcatgaattgtggggggacacagccatttagtccacagcagctattgtttactagttggggaactgcacaggtattttcctctaattctttcaacactctgtcaggagacattattatcatcctcaatttatagatgaggaactttataaatcttggggaagtcaaggaacttgcttaagatcactgagttattagagtagagctgggtttggtcctaggtttgccttcttattaaatctattgtcttttaacaggaaagtagcctaatctagtgaataagaaaaaataaatagttataacaacactgttgaaattgagccatataaaattgccagtatatgactattttttaatctaaaaaagttaattgtattgtatatgatacaacttaatagacatttctacaacaagtgtgtccaataatttgacctccctgggacacattggaagaagaagaattatcttgggccacacataaaatatactcacactaacaacagctgatgaaccaaaaaaaaatattgcaaaacgatctcataatgttttaagaacgtttaccaatttgcgtgggaatgcattcaaagccatcctgggctgcgggatggacaagcttgctctgcaaggcagaaggaatgaataaccggggagtcatccaatatgtttgtttgtttgtttgttttttagagcgagagagactgggtcttgttctgtcacccaggctggagtgcagtggcgtaatcatagctcagtgaactcctgggctcaagcagtcttcccactttggggtcctgagtagcttggactacaggcacatgtcactacatgtggataagttttttttttttttttttttttttttttgagacagagttttgctctttttgcccaggctggagttcaatggcactatcgctgctcactgcaacctgtgcctcccgggttcaagcaattcccctgcctcagcctcctgggtagctgggattacaggcacatgtcaccatgccctgctaattttgtatttttagtagagacagggtttcaccacgttggccaggctggtcttgaactcctgacctccagtaatccacctgcctcggcctcccaaactactgggattataggcaagagccactgcacccggccaattttttgttttttatagagatagggtctcactatattgcccaggctagtttcaaactcctgacctcaaacaatcctctcaccttggcctcccaaagtgctgggattccaggcatgagccaccacacccagcctcacacaccttctcatgaggtgacagcatttgcaaattcagagtcatgaaggaatgccccgcaagtgtaaccaggagttcagcttggccaggcataggtgtgagcaggagctcaaagcaggggatgagtctgggaagatggtctggggcaggctcaagggtgaagttagggcaaagtgaggaagttgtggtcagaaaaaggaatttgcatgtttaagattttggaagtgggagagttctgagtgatgatgattgaagtggaatgcagctgactgacaccgtagttaaggaagctaaggagccatcatgtaattgttcaaaagccattgatgtctctgaggatattgattaagggcaccatgctgggtagtaaagcccctgagcaacctgtgcccgggaagttagagtggatggcatggattacttatgaacggcaggtgctgcaaccactatgccctgagataatggattttatggaaataaattatgaacctattgaccctcaagatcccgactcaacattgtcatgaagaaggaagcttccgtaaattaccttcttagcctgaatgcagccttatagcttcagataagaaggaaatagtccacccagaattacactttcacttatatcttgtttataaatatatcttttaaacatcctagctctgggggaggtttgtgtgtaagctagttaaaagttatttaaactcaatttcaataaatattatttgagaggttgcaaaattggagtttagaaattcatggtcacgcacggaaggcacggtgaattgaaaaacaatcgtgctcttattaaacagaaacacaatgcatttctccttaggctgtgagcttctaggactggctcagctatctgctgccaaggctggtggtgtataatgaggtaaatctgcataaatgcatgtcatgaagccagttctatcattgttacttataattgctgttgttatatgggccgtgcgttgtgccctatgttctcgtaacagctcaatggggtagatcttgttataatccttatttatgagctaaaatcattgactaagtaacttctctctagcttagtgaggaaggcaagataggaacccaggaaactgattcttgaaacatgcatttaactactaagcaatgcagtatcccacagtaaccagggcagccgtcccaaagcctacttagccctgaaacactgctgtttaatcatcaggaataatgctatttgagtaattctaaggtggaggagtagggcatgctgcccaggtttttaaaaggcaatgagacctggcaggggctaccctcagttgtattggatactgccaacatcttaacgccaattgtcctgcgtcatgcatttatgcactcagcatttgggtcgtgtgggcatttgagtttgccgtgccttccctgttaaatcctcttttaaagcagatttaaaagatggatattcctttattttttaaaattcattttattttattttacttttttttgagacagaatttcactcttgttgcccaggctggagtgcgatggcgtgatctccactcactgcaacctcctgggttgaagtgattctcctgcctcagtctcccgagtagctgggattacaggcacccaccaccatgcctggctaattttctgtacttttagtagagacagggtttcaccatgttggccaggctggtctcaagctcctgacctcaagtgatccacctgcctcagcctcccaaagtgctgggattacaggtgtgagccactgtgccctggatatgcctttctgtgtgcctttccagcacacagttcgcaatttgtagataaaaatacttgtctcaaaatgccaatgtgtcctagggtgggcagtgggttgaagtgtgtccccccaaattcatacccatctgcaatcccagaatgtgactttatttggaaacagggtctttgctgatgtagctagttaaaatgaggtcctcctggattagggtgggccctaatgctaaagaattgtgtccttatcagaggagagagcacagacacacatacaggggaaaaggcttgtatgccagaggtagagattggaagggggtagctagaagccaaggagagctaagaattgtaagtcacccggtgccaggagagatgtttggaccagacgctccctggggcctccagcaggaaccaagcctaccaacgccttgatgttagacttccagcctctggagctgttaggaaataaattcctattgttttaagccatgatgtttgttgtcattggttatggcagcactaggaaactaataaggggtgcatggtagaaaaacatactttccatgtatatgtaaaaaattccacttctcctggactaagacgggctaattcagcactatctaaattccattcctggaccacaatattgagagaaagcatgggagtcaagtacggggaggctccaggaggactagcagcaggtggacggctgaattgcactgggtgagttgcactgacctcctttcaccctctgcagatgggatccggacgggccagcaccgttcactcttccaccccgagcagctccttagcggaaaggaggatgctgctaacaattacgcgcgaggccgttactctgtggggtcggaggtcatcgaccttgtgctggagaggacccggaagctggcaagtggctccccctctcctccgagtgggctgtgcctggggcatgtggggtcctgcggcagaactcacaagcattatctgctgtcaccatcgccaccaaccgtctctccctgggctctggtctgggtgctcagaactggggaggggttctcatcttggctttgatttccccttgttactaggaaggagacagaaacttttatacttactggggggtcccctgatcacctgatcatccctggttctcctaacacagggttcatcttgttacgagagactcccatagcactctaaaacctgtcactttccaagagtaacctgtcattttccaagagtaactgatgtttatgaagttagcaagaggcactccctatctggagatgcgtgactctatttactgataattaattcctctttaggggcctgagtctggagaccctttgctaagtaagagttttggtgtttgtcatatttgttagctactacaacaccttttacaccagcatgccagatggagcatagacgtggggggaatgttattttgcttcagtgttttgtcattttctttgttattgatgaaggccttgtttgcgatcacataccgataaatgcacagaggtcagtgaaagacaggtggatatttatgctctgcttatagtaaagctctgaagtgctttgcctactccagaagtccccttgagagtatttcaaagtagctatgtttgttgtggagttaacaaaggcaaaggagtcctttctgaaagattttgttttggggaaacctgttgtatcctgccactactgtccaattcactgcttctggatttattcagctgaattctcacatctcatttactttctccaggcagaacagtgtggtggacttcagggatttttgattttccgaagctttggaggaggcactggttcagggtttacgtctctcttaatggagaggctcacaggagaatatagcagaaagactaagctggagttctcggtctacccagcccccaggatctccactgctgtggtagagccttataactctgtcctcaccacccactccaccacagagcacacggactgtaccttcatggtggacaacgaggccgtctatgatatatgccatcgtaaactcggtgttgaatgcccctctcatgccagcatcaatagattggtggttcaggtggtatcttccatcactgcctccctccggtttgaagggcccttgaatgtagacctaattgaattccagaccaacctggtaccttatccgagaatacatttccccatgacagccttcgcccccatcgtctctgctgacaaagcctaccatgagcagttctctgtgtcagacatcaccactgcctgctttgagtcctccaaccagctggtcaagtgtgatcctcggcttgggaagtacatggcctgctgcctactctatagaggggatgtggtccccaaggaagtgaatgcagcaatcgcagccacgaagtcgaggcactctgttcagtttgtagattggtgtccaactggtttcaaggtgggcatcaacaatcggccgcccacggtgatgccgggtggggacctggccaaagtccaccggtccatctgcatgctgagcaacaccacggcgattgtggaggcctgggcccgcctggaccacaagtttgacctcatgtacgccaagagagcatttctgcactggtacctcagagaaggcatggaagaagcagagttcttggaggccagggaagatctggcagccctggagagggactatgaggaagtggcgcaaagtttctgaggcatgtatgatgggtgcaaatgaatgtcaagttaaaatggcatgttttcttttcaagccgttatatgcctagtgggtagttcccctgatgagcagaaaaatgaactcaaatcaggcaagactctaggttccacactaaattaagtgggtcagtaccaacaatgaacacattatttcctggtctactggtacaagtcagctctgctacctgggagcctttggaagcttagagtcctttgaactgctgagtcacttctaggtgggatttttttgttttaccaagagacaatgaaatcctgaagtttatgcttttcctttctggtaccggaagtagaaaacagcacatgttgattacgaatgttttttcccccatgtctacattttttacactgattaaatcataaatattttcagtatga

SEQ ID NO: 30 - protein, 446 aa, Homo sapiens
MRECLSIHIGQAGIQIGDACWELYCLEHGIQPNGVVLDTQQDQLENAKMEHTNASFDTFFCETRAGKHVPRALFVDLEPTVIDGIRTGQHRSLFHPEQLLSGKEDAANNYARGRYSVGSEVIDLVLERTRKLAEQCGGLQGFLIFRSFGGGTGSGFTSLLMERLTGEYSRKTKLEFSVYPAPRISTAVVEPYNSVLTTHSTTEHTDCTFMVDNEAVYDICHRKLGVECPSHASINRLVVQVVSSITASLRFEGPLNVDLIEFQTNLVPYPRIHFPMTAFAPIVSADKAYHEQFSVSDITTACFESSNQLVKCDPRLGKYMACCLLYRGDVVPKEVNAAIAATKSRHSVQFVDWCPTGFKVGINNRPPTVMPGGDLAKVHRSICMLSNTTAIVEAWARLDHKFDLMYAKRAFLHWYLREGMEEAEFLEAREDLAALERDYEEVAQSF

SEQ ID NO: 31 - DNA, 14054 bp, Homo sapiens
  CDS (24)..(125)
  CDS (963)..(1201)
  CDS (2620)..(2768)
  CDS (2857)..(2985)
  CDS (8903)..(9064)
  CDS (9247)..(9367)
  CDS (10641)..(10771)
  CDS (11673)..(11832)
  CDS (12697)..(12800)
  CDS (13728)..(13969)
gcttcagctgaagaaagagaggaatgaagcgccttctgcttctgtttttgttctttataacattttcttctgcatttcccttagtccggatgacggaaaatgaagaaaatatgcaactggctcaggtactgtcttaataaatgatatcgatgactattgataaaaagcttattttattgattctcttgggacctaaaaagaaaacacattcctgcaaaagagtcctgaacttttttgtgagaaggaactgcttttcatttgtctatctctgacgatatcaggaaattgtgttggggaggagggctggcacagggagggggaaaggatctgctataacttttagcaatggtcacaaatgaagggatgtttagtgcgaggagaaaggagagagccctgcaaggtatggagatcactataaaagcatttcaagacaaccaggaggacccaatctacaatttggagccctaatccctatatgtatgaaaaaaaatacattgctttacagattccctctaaaaatcagttcagttaactttttatttttggttaaagcaaatacatgtgcaaaatggataatcacttatttatcctagaacttgtttcaaagaaacaccaaaatgaaagtaacagcaaaaatatgtaagataggtcatcattcaacagacagacgaagcttcattctcttctgtggaggtttaagagctgcgtgctttggctaattctggtcactcataagtcaaccaagtcttggaaattgaaagagcagggtgactcgttattttcctctttgtgtccttcctttcttctttcctccttcactcctcactttctctcattacttcttttttttcccctttcctattgccagaaggaattttaggcaattttgctttatcctgagatggagatttgctctcctgtagtctgtgcctcttttttttttttcttatctttttggtcaggcatatctcaaccagttctactctcttgaaatagaagggaatcatcttgttcaaagcaagaataggagtctcatagatgacaaaattcgggaaatgcaagcattttttggattgacagtgactggaaaactggactcaaacacccttgagatcatgaagacacccaggtgtggggtgcctgatgtgggccagtatggctacaccctccctgggtggagaaaatacaacctcacctacaggtaatgcttctgccagcttatttccgcctaatccaaaggaacataaagataatttccaaggaacagaataatattcattcaattgactgagcacttcctgtgtgcacagcacatcttaggctccatttacggtatcttcccaacaaacctgtgctgtaggctctgctgctaccaccatcttaaatacagagaaactgaaacaaaagtttatttaccgtggctgaggttacacagctcttactggctccagcagacatgctctcatctctagcctctgccaccatcatataagctcccaacaaatactgtcatctgactgcagatacttgacagcatgaatgaagggtgcccaagagaaaatggggagaccctggaacacaaccagtttatgtcagagacatgtgtgtgtgagagagagagttgccaaatctcagatgagcccctcagagcaaagtagggtgtttccctcagacatctcaaggaaaagggggcaggctgactcattggcaggaagaggatgaggtatgcctttgatctgagacagagacagtcaccttgaccatcactctacagcctttctgatagttcttctttcatcttactgagtgctaggacttgagataaaaatgaatttagcaagataggcaacataaacgagaaaaatcttttcctgagcaattcttgtggttctcatgtaagattcttaatatatggactgggtgtggtggctcatgcctgtaatcccagcactttgggaggctgaggcagacggatcacctgagttcaggagtttgagaccagcctggcaaacgtggcaaaaccccatctctactaaaaaacacaaaaattagctgggcctggtggcacgcgcctgtagtcccagctactcaggaggctgaggcatgagaatcacttgaacctgggaggcagaggttgcagtgagccgaggtcgcgccactgcactccagcctgggggacagagcgagactctgtctcaaaaaaaaaaaagttcttaatatatggtacatgcacaagactgatttctacaagccattcaaaaaaatgattctcagttctttttaagaatgtctttataatactttcatatacaagccaacacgtacatgagataaatgctgtcttgggatgtgatcttagtgaagtcatttaacctctttcagcctcctttgttgaagtgttaatactactgattcatagggaagataaaggaatttaattctatagtatatgtaagagtatttcatttaaataaagtgctaatgcaactgtaagataattgcaccacaccaaagttactgcagcacattattgataagctagaaatgttttttgtagttatgtgtgtatattcatgcatgaataagccagaaattgacatatttttgttaatttttaagaataataaactatactccggatatggcacgagctgctgtggatgaggctatccaagaaggtttagaagtgtggagcaaagtcactccactaaaattcaccaagatttcaaaggggattgcagacatcatgattgcctttaggactcgaggtaaggttttcaacagagagcaaagctatttttatctcaggagatttgaggaagctgatcttttttcctcgcataaattgtatctcagtccatggtcggtgtcctcgctattttgatggtcccttgggagtgcttggccatgcctttcctcctggtccgggtctgggtggtgacactcattttgatgaggatgaaaactggaccaaggatggagcaggtgagtctaattttctttatgaacaaaatcttattattctaaagaatccctgaaaagaatagctttgtaactagctgctttttaactgtaaagttcccaatgtccccacaattttccatattccaagatgaccttgatggaagtgttcaatacaccctcataaagtggctacttctactatgatcagagcagtcttcattatttatacattcattcatacacccataatgtctgaggggccactgtgtgcccggaactatacaaggtgtcctatggaccccaaagttgtactagaaaagtgtaagccttcagaggttcatgatcctgtgtggtacacaaggccagcccacatacctgccatataaggcagaagatgttttgtgttgtaccagtggcagaagtcatctgttgcttgaggattgaaagaagactctagggaggtggtaattttgagttagcaattaaaggacagtatatggattcatagcccatagaggctctaattcaaagcatgaacttcctcttctaactcttgcccagctgcaaaggaatcagaccttaatccttatatttgacttatttcttcaaaccaagtaagtttattttatttttctcaatgggtctgcctggcattcaaggtgttttactactgttctgacaaaaatatcaaactgtactatattaacaggtagcaatgtaggcctcaaagaaaagagcaagctcaatagatttttgggtcccccattcttttgttctgtcattggcaatagttaccttgggtctggtgtctagcttccagagtcacaggaaagcacaggttgtagtggtcctgatggatagtatacaaggacacagatcattcccgaccatgtatctccagataatcggtctagatcagctttgcactttctgtgaaactaaaagtctgtcacacaaaatggtccatggccactcactgctcagtcagaacaggtgatgcaactgtttttccaagtgccagtgaaaagggcgaaagtcagtactggctgaggttcaggcagcagcaggcaaaatctgggattggctgctgccattgccacatgacttagcatcacaagcagacaagaaattgaaggaggtaagataacattgtcacccaagcaagagaggaaaggaatgaaccatgtctgttgtgtatcttctgctgagacatgtttcaatatttctttggtattagtctgaagacactgcgggtgtgtttcaccaaacagttacaggaaatatcctagcacttgccaaaatcagaatgactccccttgctcagccaggctttactttcatagctagaggcagagatcaaagatttcactatccttttgtctcttaaatccaatgctaagtagcagttcctcttacccatactgctttaagccctctgccaagggggacatgtggggtaagttatttttttttaagtccgatgtatctgggttccacatcggtaaggctcgcttgagcaaggcaagagataaatacagtcctcaaccaagttctgggtgggcaaccaggcagcagttccaaaaaggattgtcttctgaccactttatttcagtccctcagagtagaaattgtgggccctctgtgatccaattgtataactcttagttcactgacattaaaggggaaaataccttcctcttctccaatggaaacataaaatatcaagcaaacgtaatctccaacaaaattgcaatttttaaaaaataggcaattcagcaataacctatatgatcacctctttcattgcaatgtggaggctctgttttatggaagggtggcaaaaatcttggtgtaacttgcttaagagcaacagacacatcatctgccaatgatgctattaagctgcttcctccgggaagaacaggtcatcgcatggggatgtcagaggactttaagcacatacagagattttcctgagagtctctcaaagcaaagccaggtgccaagcctattgtgagtgtgtgtgtggcacacacgtgtgcaccaaacaactgaacaggccttacagactgctacagatgcagtgttgggaaggagaaaaagcaatggtttgtagtttggcagacactggttcctttcagggcttcccattgaccagctgagggacccggggcaagtcaagtaattttcttactctctatttctttgcctgtaaaagagtaatgatgctcttcttttaggagggtgaaataaattacccttaccctaactaggttaataaaggtgaaaacccctttcagagcagttgtccatagtgaacactcagaaagtgcttgacatcaaagattctgttgacaattgttagtattgatgatgataatgataactagggtggaattacattctaggcataaggaaaaatatttgaaaagctatgaatgtataatgcacaaatttgtctatttagtcacatctccatgagacagagacttttgtcatcttttacctacagcgtcatatggccaataacagtgttgtcacatgagaaatactctacaaatcattggtaaataaagtcactcaatgatcatttattgaacatccactatgactcaggctctgtcataaaaatgaaatatacccttgtatataggacacagaagctgccctccagggcttcactgtctaagggacacatagacaattaaatggcaactaaaatcagtaggatcagtactgagataaaggaaactatggcaatgtaataggtcctcacagaagaaagtccaacccagacccacaggtcagcagaggaagctatgtcaagcctgagaactggaggctcagcaggaactaagaagacaaagtagggtgaagagggtgaataggagtgttctgaacagaatagctcaatccaacataaggaatagaattgtagaagacaaggctaaaatggcgaataggattcagattacagagggtcttgaaagccagaataaagatctggacttcatttagaaaatctgagcttgaattatttttcccaacagtcatttttccagttccttgtccaaaagcacacacagtgatatagccagccaggcaaggggcagcaacaaaggcaagagcagaaaagtgtcaaagaccatgacataattctttgcccttttacgtttgcttcatgcaaacatcactaggcaaatttccatcagggaagctgaggttttccttaggctccatgcacttagttgcaaagccagggatggactttatgtatgtatgtatgtatttatttatttattttttgagaccgggtctcactctgtcacccaggctggagtgcagtggtgcgatctcggctcactacaacctatgcctattggactcaagcaattctcctacctcagcctcccaaatagcttggactacaggcacaggtcaccttgcctggctaattttttttttctttagtagagacagggtttctccatgttacccaggctgctcttgaactcctgagctcaagatatccacccaccttggtctcccaaagtgctgagattacaagagtgaaccaccacgccaggcccaagagggtggtcttctatacttagagccttacagactagtgggagaggcagacaaagacaaaggcaattctaacatgcctggtaagacttctggaaagggcactatggtcatgtttaggaaacacatctaaccatttttgcattagacaacacttggacatccattaatcattattaagcagtcacaatcactaggaataaaagataattaagacatggttcctgtactcagggtgacagaaacaaacaatgcagtccttacgggctatgacagaatcaagtgctgagtctgtggaagctggagccatgcatttaactcaacctggataagacctggagggataagggaagttacatgaaggaaataactttagaggggagtcctggggaataaataggatagttaagccaggagaaagtggaagagatatgttattagcaaagagacaaaggtatgaagacatagagattagaaagaacctgacacagatgaaaaatgccagcgatttaacatagttagcttgcagaatatgaaaataaaatataaggctgaaaataggcagggactagaccatggaaggtcatgtgaaggtgtttggactttatcctatagcaatacagaacctctgaagaatagaagtaggagcaacatgatcacatatactgtagtctagcaacaaccccaaactggtggcttctttttttttttaatattatccatttctgagacaccggtttcaagccattttcttaccctaggctatatttttccatgatgtgactagtaccaattaaagttatgtgccatttaatcatattttggtcaactatggactatggatatgacagtggtcccattcgattatgatggagctgaaaatttcctatcacctagtgatgtcacagcacaacacattactcacatgtttgtggtgatgttgatataaacaaacttaccgtgctgccagtcatataaaagttcagcacatacaattgtgtgaagtacataatacttgataataagcaaccatgttactggtttatgtatttaatgtactatacctcttatggttattttagaatgtactcctacttgtacaaaaaaaaagaaagaaagaaagaataggtaactgtaaaacagcctcaggcaggcccttcaggagggattccagaagaaggcatcgttatcctaggagatgacagctccatgcctgttattgcccctgaagactttccagtgggacaagatgtggaggtggaagacagtaatacggatgaccctgatcaaaggaaggaaatatttttgtacagctgtacaacaagtttgtgttttaagctaagtcacaataaagtccaaaattttaaaaatttaaaagtttaggccaggtatggtggctcacacctgtaatcccagcacttcgaaagaccaagccggaggattgctttagcctggagttcaagatcagcctgggcaacatagtgagacccccatctctacaaaaataaataagaaaattagctggacatggtggcatgcacctgtagtcccagctgcacaggaggctgagggaggaggattgtccaagcctaggagtttgaagctgcagtgagctgtaatcacaccactccagcctgggcaacagagcaagaccctgcctcaaaaaaaaaatttataaagtaaaaaagttactgtaagcaaaagttaatttattattgaagaaaaatatttttaatttggtgtagcttaagtgtctagtgtttatacagtctacataatgtactgtaagtcctaggccttcacattcactcaccactcactcactgactcacccagagcaacttccagtcctgcaagctccattcatggtaagtgtcctacatagctgtactattttttatcttttataccatatttttactgtaccttctccatgttcagatatgtttagatagacaaatgcttaccattgcgctaaataattgcttaccattgtgctacaattgcctataatattcagtacagtaacgtgcaatacaggtttgtagcctgggagcaagaggctataccatgtaaccttggtgtgtagtgggctgtgccatctaggtttgtgtaagtgcaccctataatgtttgctcaatgatgcatttctcagaacatatccatatcattaagcaacacatgacttattagcattgcaatacctcccagataaatggtggtacatatgagaattatctgctgtatagcaagcctttatttcattccccttagttactttctaatctcagatgcagccattctctttttgattaagtcatgtgctcgtgttttccctgttattatcaaggattcaacttgtttcttgtggctgctcatgaatttggtcatgcactggggctctctcactccaatgatcaaacagccttgatgttcccaaattatgtctccctggatcccagaaaatacccactttctcaggatgatatcaatggaatccagtccatctatggtgagcaaaattataaatctcaatatatgtgaactaaataggaagcttttcagaaaggaagttaagaaaatcacttcttgaaatattatcatgaagcaaatatccacttaggtaagacccttgtgtaggcatatttcttcatgccctcttaattcattgtggtattttttttctcatcaaaggaggtctgcctaaggaacctgctaagccaaaggaacccactataccccatgcctgtgaccctgacttgacttttgacgctatcacaactttccgcagagaagtaatgttctttaaaggcaggtaaactcatttctctaaacacctcaacttcctatgaagatttttcttttcaagagatttgaggataaagaggtagtcatggggctagtgaaaatgtgtgccttttatcttcattttataactgcctatactgtttgaatgctttaccatatgtgtgtctcttgtagttgtttgataaatttttaaatgtctttaaggaattttaaaaattgccattgcataagaaagggaaatagagtccactttcagtgactttttggccagaagagtccaccaatcccagtggcctactgaagccaacttacactccgttacaggagtctattgttaaattttcaggaattttgcaaaccagttcacatcacataggcagcttgaaattggccatggttggagtatttacatctgaaaatcagcaaatgattaaagtcatgtcttcttcccacctggagagccagttgttaaacatgggtcagcacctcactgaacgtttcttaaagttgcatcaataaagtgttagctgtagtgggaaatcccttctctcactacaatttattgaacttaagttacagcatggtgtgtcagttatgtagaccatgaccatatttttatagcaaaataccaagacatacaccattgacaaagatataggggcaaaaggaaagaatatttgaaattggactcctttcacccatgaatatatcgcgttacaatcacatgttatcaccaccattctctgaccagcagaggccaagagctacccaccatgaatgtcacagaggagtggcctgtatgtggagggaaatggaatataaggacttttcacgtctcattcatagactcagaattttgcagccagaagggaaattctgaagaagtattttcgcatgtcagtgattacatttctttattccagcaagcatctgcttcaaaaagttcctcttaggaatgcttggtgttggcttagaatgttgggtgttgctgctttggcaaaaacaaaaccattgagcactcagaactcagaataagatttccatgatgagtttgccactctacggatccaagagtgggcacaaaggcatgtcctggacttggaagtcccaaactgaactgaactcacaatcacctaaatttactggggaaaattatgctaattatctcaattatttgaggaagataccaaccaattagctaaaaggcaagcctaagattacaaaattctcattgacatggaaataggctgcatgtgtaaagtgttttttgtttaacacaggcacctatggaggatctattatgatatcacggatgttgagtttgaattaattgcttcattctggccatctctgccagctgatctgcaagctgcatacgagaaccccagagataagattctggtttttaaaggtaacctggcccatcccgattcctcttctccctctggctgcctgaactaaccagtggatattttggtgtaagaaataaaatcttcatgcatgagccaaggcgcagggcttttgctctcatcttaggttcctgtcgtaaagaatataaataaccaggattctctgtggctgtgaagataaacacaatcctagttgcacagggactaaaataaacctgtgtgataaaaactaaaaaagtctctttttctgccaaataaaggtaattaatctgtctttaatgttcactttttactaaggttgccagatttggcaaataaaaatataggacactataaatttcagataaacaacaaataattttttggtatatatatatatcccttaaaatattttgtatttatttataccaaaagttagtcattgtttacttgaaatcaaatttaactgacattttctgtttaatgatcatgatcttatcagattactagcctttgagagcacttgggggctgaaacttaggagaacatgtccaaacatacttcattttaaaaatttcaattgacataataattgtacatatttatggggtacaatgtgatgtttaaatacatatatgcattgcttacttgattgttttgacagagttagccaattaaaagcaatcaatgcaatgaaaccaattgacaaaggtacgcatactattgacttttacaggtatatattatttgtgtaatataaataatatgagcagctaaagaaagtggtaggaatgaatgtggacataagattattaaatctctaagcactgaagctaaaaggaactaggtatctaatgatttttaaatttcttgagatacctatttctccctctagaaaataaataatcactcctctcttcctagatgaaaacttctggatgatcagaggatatgctgtcttgccagattatcccaaatccatccatacattaggttttccaggacgtgtgaagaaaatagatgcagccgtctgtgataagaccacaagaaaaacctacttctttgtgggcatttggtgctggaggtaagtttacagacaattgacactttgttttattatggagaaaaatattcacaatagcatcactttgacacagacaaaattaaaatgaatccataatattttttatttttttattttttttgagatggagtcttgctctgtctcccaggctagagtgtagtgctgcaatctctgctcactgcagcctcgacctcctgctttcaagagatcctcctgtctcagcaacccccaagtaactgatactacaggcatgtgccaccacgcctggctaatttttgtactttttgtagagatggagtttcaccatgattctcagtctggtctcgaactcctgggctcaagcgatccacccacctcggcctctcaaagtgctgggattacaggcatgagtcgccacgcccagcccatagtcttcttaaagtgaataatgaaggcagtggatgacatttatcaagccgaaagagatctcaatgagtctaatgactttccttcaatttaaaaaaaaagataagataaaataaaaagttggtgatcccaaccaaattgccaatgacacaaacatatctagtgaaaaattttgaaagctccaagctcagccttcaatctgatgtaacgatttctctgaatagcatcaatctaacatatgttgtgccctttttccctgatcatttcttgtttggaagattctataaatgattcaaccaaacataatctttactgtatttttattattgatccaattagttttcctctactatgcctatgtattccccacatccctgcttgactctaagttgtgcggtagacaaattaagctccccaaaccaaagatccgctggtatcctttcatattcttgtatgcaggtttgatgaaatgacccaaaccatggacaaagggttcccgcagagagtggtaaaacactttcctggaatcagtatccgtgttgatgctgctttccagtacaaaggtaagcatggatgtctcacttattgggatacttgagagactgtgttgactgtgaaaaaagacagcacaaaaacttaaatgcttttattttaatgcaattttgctactcttaagtatatacaataataaacattaaccccacaaacattatcacaaactgaatccataaatcctgaattatactctctgttatactatctcaaatctatgtaaaaagtaccaaatccattttactcatcattgataagtaaagacaccccctaaagtgtgcgaagtgactaagcacatgaacaaaacaatgattctcaaactttaatgtatgtaccttaatgtacatagcttggggtttgtgtgtgaaacaaagtatttgaggcagaattgtgagtgatacctaagaatctgcagttttaaaagaacctcaggcaatgtaatgaatacaatccagcaactatatcatccaagacaatgacctagaccatggggtaatctagaaatatctttgagtgacatgatctattattacaatgaaatctaacacagaacctcaaaacctaaaacagatcaaagtagaacggctctaagaaaatgagaatatagagaccaaggccatatccacaggggccttttcctccccctcactgagacactttgttgaagcctagtttgaaaacctctggcatagaccacagtctggctagaaaggtaaaaagtcccttgaaactcaccctttataacactggcttcctccttagggaaataaaaataataggatttcccacatgacagtagaaaactaaaatgtatgtatgtgattccacaaatttcttcgttctccataatgttatttttttccatgtttataaaatttaaaagtatggaagtattatatagttatgaaagataactaatcctgattccctgtctctaggattcttctttttcagccgtggatcaaagcaatttgaatacgacattaagacaaagaatattacccgaatcatgagaactaatacttggtttcaatgcaaagaaccaaagaactcctcatttggttttgatatcaacaaggaaaaagcacattcaggaggcataaagatattgtatcataagagtttaagcttgtttatttttggtattgttcatttgctgaaaaacacttctatttatcaataaattcatagacctaaaataaacctcaacaggtcttttaatataaattctgcttcaaaatagaataaaaccattctttaacaac

SEQ ID NO: 32 - protein, 513 aa, Homo sapiens
MKRLLLLFLFFITFSSAFPLVRMTENEENMQLAQAYLNQFYSLEIEGNHLVQSKNRSLIDDKIREMQAFFGLTVTGKLDSNTLEIMKTPRCGVPDVGQYGYTLPGWRKYNLTYRIINYTPDMARAAVDEAIQEGLEVWSKVTPLKFTKISKGIADIMIAFRTRVHGRCPRYFDGPLGVLGHAFPPGPGLGGDTHFDEDENWTKDGAGFNLFLVAAHEFGHALGLSHSNDQTALMFPNYVSLDPRKYPLSQDDINGIQSIYGGLPKEPAKPKEPTIPHACDPDLTFDAITTFRREVMFFKGRHLWRIYYDITDVEFELIASFWPSLPADLQAAYENPRDKILVFKDENFWMIRGYAVLPDYPKSIHTLGFPGRVKKIDAAVCDKTTRKTYFFVGIWCWRFDEMTQTMDKGFPQRVVKHFPGISIRVDAAFQYKGFFFFSRGSKQFEYDIKTKNITRIMRTNTWFQCKEPKNSSFGFDINKEKAHSGGIKILYHKSLSLFIFGIVHLLKNTSIYQ

SEQ ID NO: 33 - DNA, 244042 bp, Homo sapiens
  CDS (94)..(156)
  CDS (30996)..(31140)
  CDS (51118)..(51318)
  CDS (74457)..(74664)
  CDS (93460)..(93641)
  CDS (144960)..(145073)
  CDS (154205)..(154312)
  CDS (157792)..(157902)
  CDS (159989)..(160105)
  CDS (163543)..(163650)
  CDS (172780)..(173011)
  CDS (176187)..(176332)
  CDS (184383)..(184490)
  CDS (192849)..(192962)
  CDS (194787)..(194897)
  CDS (195994)..(196123)
  CDS (211522)..(211638)
  CDS (214095)..(214144)
  CDS (214298)..(214472)
  CDS (234375)..(234646)
  CDS (237696)..(237829)
  CDS (242140)..(242319)
aaatcatccgtagtgcctccccgggggacacgtagaggagagaaaagcgaccaagataaaagtggacagaagaataagcgagactttttatccatgaaacagtctcctgccctcgctccggaagagcgctgccgcagagccgggtccccaaagccggtaagatcgatgattcgctgtcctaccgcagccaggtgtgatggcctcttagtcccggtgaattcagggtcagcccctcccgcccccgtcctctcctccgcccgatgccacctccttccccagccgccggtgagctcccgctctgacagttccgcgctcagcgccctgcacccagttcccaggcgcacggccctggtcccgaccaccaccccggtcgcccggcgtccgagaccctcccagggtcatgggcagggtttccttcagtgttcgagtcggctcgatccggagaccccggtctccatgccgggggtgatgccacctttcctgcagagtccctcctccgcacggtgccctccaagcatctagtggacttggctgcacactggcggcaggggaggctgcaggtggagctgtcggagccagcccctcggggatctacagcttcctgtctgcgccggcgtctcgggcgccgggtggctggagggactgtgcagcagtcttgcctgccccagacgtaagcccccttccccagctgcgagcgcctgggtgtcggtccctccacagcccgggctcgcgcttggttccccggcccccagttggtgcctggggatcactcgcccgtcctaagtgctggcatcccagaactggccctcttgcagagtgctgggaacttgtaggtccctgcgtgcaaactttctccggcgtgaacctgcctaggcacaggagggctggccgccgggggcgcaggctctgcgctgtaggatttggttggctcagatccagtcctgggaaggggcagcgttggctctcgttcaggaggagaaagaaagggaagggcaccacggacagtccctactggcctgagcccccaggaagaaggtctaatttgcggctgcccctctccttcggtgtcattagggccccggaatccgcttgctaccgcgagggtcccagctgctccgaatcggggaccgaccggtgacgctagctgcaggcagagagggcaggctgtgcgggcggaagggaggtggtgtcttgtcggatcttactgggacccagttcctgagctcccgtggcaggcgcctcactcctgctactacctgctcggggccagtggatggcagtgtacgcgctttttgcacggctcccggttcctgggaccgagccctgggagctctgactttgaattcagcagggaagcttcggggctgggcattcccagggaagctgttcgagtaattcataaagtggagctttcctcccgcgggaaacttctgagaacgatgcgctgcgaagacggactcctgtacaagacttcgatgactgacataggcacaattgtggcttctagtttttattttaactttttatttaaagtaacttatcgatggaagcgaaactctgcaaaggaacgtcagaccgctaccagaaagggggtgaagtcaggacttactggtgattattgtccaaggacacatttaagcagatagttttgaaattaattttggcataaccctgagacaatgagaagaaacaatgcatttataaaaagttattaaaccatttttttttgtcacagtcaaaacattcattagcttgtttctattattaggtgcccaataggtttgttgtgtgagattgtgctaaaaattggtcctcagatcctgggacttgagaggttagaggaggttcctggggcttgcgaggttagaggagatgtctgcatagactcacgtgtgggcttggctgaccaggcaggttttccatagaatgctttccaggacaccaagaatttcaataggatgaactattttggggttatttgggtgtggaaacacatcaacctcaaaaccccaagattctataaggcattttttaagggggaggggactctttccagaaagttcctttcagggtaggcttacaggaccaacgatgaaagcctctgttaaccttcctgtgggttaaaaagacacaccaagaattgctctattaaccttatcaagcacatatccaggtacagagacactttcttaaaagatgcaaaattcattccatcagaaaccttcctcataatgctgcagaaatcacaatagcaacagcatagaaggcaggcatcagtgcttccgcatcttgcattccacaaccagctgtggtttccttttggaagggtcacattctccaccatagcttcatgtggatttcagcagttgctagttctattgactggccagcccctctgttgacctcccccactgttgggggcagacaggaagttagaggagaagctgagtggcccaggagcttcagagagtcactttcaaaagcctgtactttcaaatctccatactgttaatgaggtactcctttccttatttttcctcttttccgcacttgtagcctctttcaacacaaagacttgtggtcttagggtttctgagtgtccccactgctggggtaataagagctctctgaggagcaggagagccgcaacactgaattgttgctgagcgtatctgagggggaaaggtttgtttgacctgctacttctacctaataagttattcaacaagtatggattcatgcatcctgttagccccatcactattcttggcattccattttgctggaccaaatggaaaatgaggctggctggctaaagggtactgacctgatactggctggctaaacatactaggttcacactaaacactcaagggattccaagacttacctgttcctcagagtctacacactcacataaagacacacacagacataatacacttgtttgttttatgtctgttcagagagggtggaaatggcagaccccttaagagtagaaggtgctgtagatgacctgccttggtgggaagagtaggagctttggtgtcagacctctgactctgccccttaagaaccgcaaggctctgggcaagtcaaataatcttgctgggcctcagtttccttggtcagaaaatgtagatggtactactgaccactggtaaggacactgcagactgtggaatacgtactagaagtactttatgtaatagtggtatattctggtgaaggttccctaacctttttttaaaaaactactttattgaagtattggcgagcaaaaacctgtatatatttaatgtaaacaatgtgataggtttggaaacaagtatacatctataaaaccgtcaccacaattaatgtcacaaacctatccatcatcttcaaaagttcccttctgccatctttattattgttattattattttgttataaggacacttaacataagatctacccacctagcaaatttttaagtatagaatatagtattcttaactacagaagccatgctgtgtagtagatttctaggacttatttatcttgcattactgaaactttatacccttggtccaatacctccccatttcctcctcctctgggaaaccaccattccactctctgcttctatgagtttgactgttttaagattcctcaattaagtgggatcatgtagtatttgtccttctgtgtctggcttatttcacttagcatagtgtcctctaggttcatctctgctgtcagaaatggtaggatttgtttctttgttaaggctgagtaatattgtactgtatgtatatatacatactgtttatatataccccatttttctttatccattcatctatcagtggacattaggctgctcctatgtttttgctattgtgaataatgctgcaatgcacatgggaatgcagatgtcttttcaagatcccaattttaaattctttggttacatatctagaaatgggatcatatgttagttctatactgtatgctggtatcatatgctggatcatatgatagttctatttttaatttttttgaggaacttccatactctttcccataatggttgcaccaatttacattcccatgaaccatatacaagagatgcattttcttggcatccaacacttgttatcttttgttttttgatcacattaacagtggcaaagggctgaaatctctttgtggttttgatttgtaattctctgttgattggtgatgttgagcatctttcatatacttactggccatttttatgtcttctttggagtaatgtctatttaggtctttttcccattttaaaatcaggctattagctttttggctactgaattgaaggagttccttatatatgttggatattaatcctttatcagatatatgattcgcaaatattttctcccactttatagattgccttttcattttgttgatcatatcgtttgctatgcagaagctttttagtttagcataatcttatttggttattattgcttttttttttttttttttgcctatgcttttggtgtcgtatccaagaaattatcgccgagatcaatgtcaagattttcctttatgttttctttcagaaattttacagtttcaggtcttatggttaagtctttaatccattttaacttgatttttgtgcatggcatgagataaagttccaatgttattcttttgcatatgtgtagccagttttcccagcaccatttgttgaagacatatctttcctccattgtatattcttggcatccttgtcaactatgtatgtatgagtttatttctgggatctctcttctgtttggccatatggctgttttcatatgagtaccatactgttttgattagtgtagctttgtaatatattttgaaatcatgacgtatgatacctctagcttttttttttcttgctcgtaattgctttggtgatttgtttcctaatctgtttttacttgaggatccagtctcatcctagacttggtgagaaatgtctcaagactttttccacaggcagctttctgtgactctagagccatgtgatgcaatggagtagctcttagccaattgtggttgtttaaatttaatcaacattaaatcaaattaaaaatttatttcttcagtctccttgggcacattttaagtgctcagttattttataaagctggtggcaactgtattgggcagcacagatacatgatctccttcgttgcaggctgttctctcaggcagttctagagctttcttttgcttgagtgatgatataagattttaggatgataaaaattttcctaggccaaggcacagtggctcactgggattactggaggctgagccagatggatcacctgaggtcaggagttcgagaccagcttggccaacatggcaaaacaccatctctactaaaaatacaaaaaaattaccagggcgtgatggcacctgcctgtagtcccagctacttgggaggctgaggcaagagaattgcttaaatccgggaggcagaggctgcagtgagccgagatcatcccagtgcactccggcctgggtgatagagcgagactccatctcaaaaaaaaaaaaaaaaagaaaagaaaagaaagaaagaaagaaaagaaaagaaaaagttttcctgtaaagcacctctatttgcttctttttcttttaagaagtggtttcctatagcagaatcacttccgtttgttgaggtctcttacgtggcctaggcatttgttgaatagtaaatggccagattgatgtataaatcactgacaagtgagtattagtcacataatcctctgagttctccccttcagccttgatgattttgcttatgtattgttcttttccctccctatgagctttatggccgatgattttcctggttttacagcagaaactaatacaacagaaggaggctcttctccctccatatgtactcctacatgttgtaccattttttacaagaatgaaagcactataatactaagtacaatgtttgggggaaagatccaccaagtgtttaatttaatcaggcttaaaaactaatactccacctcactacgtaggaccccttcttgaactcatcctcatttgacaaactatatattttacttccatggccttcctggtgtgtgtttctgtgtgttctcttattataagaacatcagtcatattggatttaggcttcaccctaatccagtatgaccttgtcctaactaacttcaactgcaaagaccctatatgcaaaggaaggacacattttgaggttctcggtgaacatatattttggagacactattcaacccattacagatgcatagataggtcagtcttttccctagctggatttcttaccccatgaagtatattctgttcctgaggctttactaaatctgctttagtgcaagcacaatctgtaatgtttattattctcatggacagacgatcatcatgcaggttgggagattatgttctgctaatgagcgctttctacctgggtgtggaacacatgggatgactcaccttgggactgctgaatcagctgttcttccccaagcctgtcactgtccccagttctgtcttcagtctccaccctttctcttcactcataaagagccacagtcatcctggagcagtggctagtctgtttgcctctttcttgagccttctgcattggcgtttggtctgctctgagctctgctgaagggtgcccattaattatgccttcccttctgcctgctggcagttgtcccgatcagctcaccttacagcagctgtttgcatattctcctgcaatacatttctacatgtccaaaccatcagagctggtggtgacaaatgcagtgtcaatgcttaatcaggctggttgaggatccaaggttgtcctgtaggtgatccatcttgtcattaatgtcagtgctgaaactctgtaagaggctcaagatgacatctgtggagaagggccagtcggccaacaggctggcttaggagcagggcagaaaatatagaggcgagttgcgaagaccattttggtgtctccagcttgtgcttccttagcccagggtcccttcaacctgttaacctttaggttgacagcacttgaagagtactttttgtttgtagcactttgggggagttttaaagtcctatgcagctatgaaagtaggtgtcagtgtctctgaagccacaaaagtgtcattctgctgaagtgtcatagatagagattgacagtaccaggaaatcttaatctgagactccaagaacctcctgaatggtgaaaaatctttttatgcatagttctgtttgaatttttctggtaatagcaccacaacttcccaagaagtgaaagccatagctagacctaaatagctttaatgtatgagaattcaactatacaggctggacaaaaagaatacattcatctccttatttaacaaacatttatgtgacaggtatattattaggcacttaggagacatctatgaacaaaacagggattcatgcacttgtgaagcttggtttctaactaagcaataaaccctaaaccatgagtgcagggaggagagatgaatgtttaattaatatgagtcattctattcagtgtcctggagtaagagcaaaagatgagagaaaggaatctgccattagtttcagaacctggtgccttttatgtgtatcctttttgcagttccacgtgtgatcctgggtttaaagattgtgccattttattccctaacctcaagccaattaattaatctggtactcaaccgatgagcctgttccagctctgaaacaaaaaaaaaacaaacaccatgtgggatttattgttggaagttacattggtctccaatgtgacactctcttaaggcttttcagggattagtttgacagtacatgattttcatcttcatgtgcctattttagagccttattctgggagcaagatgctacttctctgtagtgtggtttggaaatcaaagctatattgttttatttactatttctctgtcatcctttaaaacagttttgtccaagtcaagcatcatcagaaaggggagttcaataagaagttggtattaggttgctgagattttacagaagtcagttaaccttttagatcctggtttacttgtgtaaaatgaggtagttggactatttactctttcagggcctttttcaatctaaaggctataatttttatgtggcagcagaaaatgagcaggacactgtcccattttactttattgtttctctcttccctttctgatagctgacaagtggtgtgttttttccttcctgacaccagatgcatggtatctttcctgacaccactgctgcaactctctgacaccaactgggtgtccaataattcaactcaattctgacactatctacctggagttagtgccagatcccacaagactgcccccactttagatgacagttgcaagttctgggccacctgcacttctgactgattggccatgaatcaggggttcccataactccctccctcttcaggtttgataatttgccctgatggctcacagaactcaggacaacacttaactcacattcactggtttatgataaaggatacgaatgaacagccagatgaagaggtgcctaggccaaggtccagaaggtccagaaggtccagaagggtcctgccccagtagaaatataatgttagccacagatgtaattttagattgtctagtagctgcactgaaaaagcaaaaagaaacagataaatttgaacttaataagatagcttaactcaatgtatccaagatttcataattttaatatgtaatcaacataaaaattaatgaaatatttcaccttttttttttttttttttttttttttttgagacggagtctcgccctgtcacccaggctggagtgcagtggcgcgatctcggctcactgcaagctccgcctcccgggttcacgctattctcctgcctcagcctcctgagtagctgggactacaggcgcccaccaccatgcccggctaattttttgtatttttagtggagacggggtttcaccgtgttagccaagatggtctcgatctcctgacctcgtgatccgtccgcctcggcctcccaaagtgctgagattacaggcatgagccaccgcgccgggcctacctttttttttcataacaagtctttaaatttcactacccttacagcatttctccattcaaatgagctacactgcacatgctcaataacgacatgtagcaaatgtctgcggtatgagagaatacagggttatatggtgtgagatggtctgaacaatgacccctggaataaacccacatcttaatccctgagacctgtgaatattattttatatgtcaaaattgtcaaaagggactttgcaaatgtaattaaattaaggattttgagatggggagattatcttggattatctgggaggtcctgatgtgatcacaatgcccttagaaagtgcaggagcttctgtccccatggagttggagtgctcccagaatgtagatgtgttcaccaattcagaaactctaagccctgacacttaggggtttttatggagattttgttcatcacacaggcatgagtatgtggttattaattcaatgtctagccctctctcctcccaggaggttggggagtagggctgaaaactctaggcttctaatcaaagtttggtttttctggagaccagcccctatcctgaagctagctaggagttttcaagaatccaagaatcacctcgttagaacaaaagttagaacaaaaggtgctcttatcactcttatcactcaggatattccaagggatttaaggagtcctgtgtcaggaattgggaaaaaaaacaaacacatacttctgattatgccataggagtgctgcctgggtaaggggcatcctacatgaccttagtgtccacttccctcttagtgggcatttgctaattcttcttacagtgaccctctgccaaagtgaaaaattgcctgttcaaccccaaaagactgatcagaggaaagctgggaggcagtttaaactaccatagctctggtttctctgagggtatctactctggctagaggtcagatccgaacatcttacctatgtatgcagctatgggtggtgaacagaacgaggagagacagtcattggtatcagggctcttccaccagatggcccaggatcaagctgggtgccaggtgtgcctctgggtgctgaggaagtgtgacacaggagaaaatcttctttaaataactgggtgggaaatatgcccctatgccttcaaagttaagaaataatttttaaaaaaacataataaaaatgtgctcagaatagcaaaagagcagaactttaaggtagaaagggaaaatcctgagatctctgaaatttaggagggtggaaagtaaaaccactcaggaagtagagtgagcctgattaaaccactaaacccaaaccaggaaatcagtcaggcagccttgggtgcagaggtgcatagacatgggctcaagttctagcttatcacttactgactgggtgctcctccagcaagttaatttcccttaggctccattttcttctctgaaaagttggaataatacatctcttacaaggctgtaatgaggacttaatgaaagaatgtattaatgaaaatgctttattagaatgcatgttgctggataaatgtattttttttattgttacgcttatctagttgtgcatatccctaataaaatatctctcttgaattgacatcttaattgcaggaatttagtggctctctctagagaaagaagaaatgttgcttccaaagtctgggctctcttataagtaaggcaaaaataaaacaactgaaagttaatgtcaccctgcctcctttatggtctgtagtaggactgctccaatagaaatataatgttagccacagatgtaatttaaaattgtctagtagctgcacttgaaaaagcaaaaagaaacagatgaatttaatcttaataagatagcttatttaactcaatatatccaagattttataattttaatatgtaatcaacataaaaattattaatgaaatcttttacctttttttcataacaagtctttaaatttcactacccttatagcatttctcagttcaaatgagctgcattgcaggtgctcaatgacaacacatagcgagtgtctatggcattagagggtacagggctttatggagcgagatgttccgaacaatgaccccctagataaacccacatactaatgcctgagacctgtgaatattattttctatgtcaaaagggactttgcaaatgtaattaaataaaggattttgagatggggagattatcttgaattatgtgggaggtcctgatgtgatcacaaagcccttagagaggcagaaaggtcagaatcacatgtgacaattagtgatggtggatgtagagatgggaggagaaatgtgctttgaagatacaggaaggggccacaagccagggaatagacacagccactataagctgaaaaagacacagattttcccctgagagccttcagaaggaagcagccttgataacaccttgactttagtccagtgaaactgatttcagacttccaacctccagaactgtgagacaataaatttgtgttgctttaaactactaagtgtatggtaatttgttacagcagcaagaagaaacaactatataactgatacacaaatattcacatcatttccaagcgtgttttgtgaaggtgttgccctggctgcagagtcttagacaatcacagttgttcatctcagcttgtgctggggtaggcatttgcagtcattcctagggtttttgtgcattactgctatcttcccttagcgctggggtctatttctttctctgacccaattgccgcctttgatggcaaaaactcagttggtgtcttatcactgcctttaaggacgaacagaggaaggaggttttcttattagggtacagtgagcagcagaaaaaagcaatggttggctggattcagtggctcacacctgtaatcctagcactttgggaggatgaggctggcagattgctgaggtcaggagttcgagaccagtccggacaacacggtgaatccctgtctctactaaaaatacaaaaattgaccagacatggtggtgggcacctgtaatctagtaagctagttggcaggctgaggcagcagaatcatttgagcctgggaggcagaggttgcagtgagccgagatcacgccactgcactccagcctgggtgacagagtgagactccatctaaaaaaaaaaaaaaaaaaaaaagcagtggtttgaaaaagttactggtgatttttactatctgctcactttttttttctggtaagtgtaaaaatgttctaaaagttattcatttaaaagaattactgcaatgtgggcttggtgggattcaagtgttactcttacgtctttatctatgaatgttagcgaatgtgtgattaggccagtgatcctagaactttagtgtgcatgagaattacctggagggtctgatccaacatggatcgctgggtcccattgtcagtttctaatttaacaggtctgggttgagacccaagaattcatgtgtctaacaagtcccaggtgatgctaattagccgcagataggtgtggtgtgggaaagcccggcagaatacctcgcctgcaagggggactcccaggcctcacttctatggggagggggccacataattgccaggaaagactctgaggctggctttccatcgctgatccggacacttacagagccctcctccagcaacaagcccagcaattggttgctaaggaactggagagtccgcacacagcctctcttgcttggctctgttttgtgtctcgcaccctgaggcctgaagcagatgacaattctgagcttctcaagtctcagttaaaaatacctcatttgccacaggccagcggtgtgctcacatttcccaggtggagtgactccctggacctgcggctgccctggtggaaagtctgtaagcagataacaccaggttaaaaatagccctggggaggcccctcaaagctgtcacactcagctgcccacgttgggtaagcaaggcagagtggggagggatctttcaagctaggaatgactgaaggactgtctggctgtgtccagtttcattccctaaagaggttaggacaaacttgagagtttagcgttctctttccccttggcctttgtggttttttgaattcaaaatctagacttggatacacagctctaatctggcctgtggtgctttttattctgccctcttctgcagaacaatagaatcataacaatagaattgagtttccatcctgtttgaaattaaaacaaagaaggtgaacctggggcatggtggctcatggctgtaatcccagcactttgggaggctgaagggagaggattgcttgaggccaggagtttaagaccagcctgggcaacatactgagactctgtctctacaaagcaaaaaaagaaagaaagaaaagcttttcctaaggcatcctggtgagaacgtgaagtggccccaacaaaggacctgcaagatctcacctgggtgtgccttggtcagtggtccgagttgttttatgacaagctcagcttacctgtttggcctcctggtagcactgtgtgtgtatttttttttttttttttctgttgttgtttaacactacctctattaactgaatgcaaataagaggaacaaaaatgctctttgaataagaaacatatattcctaacaatattctcaaatcatttcatgtcagccactcctaaaaatgctcttgtattgttattctcctttatatatgctttaggagaaaaaaggagtaaaaaaaaaaaaaaaaggaatagcattgattgctttccatagatttcaaaactttggattttcctattccttgctccttggtgaacaactgagtcctgaatggttcagtggacagagtaaggtgggttctaaagtgtggggagggacagcagcacgtcagccacatcaacaaggacaggtggccagcagagtatgttggtgcctaagcagggtaaggatggtgtgtgtggaggtcaacctaagatggggttcagggtctgagtaggaggaggaaggtgtccatgcataggagagccagggcagaatgagcacggcgtctgggacagggtgagcatggcgcccacatggcagctggggctgggacatgggaaattagttacagactgggggattgatcaagcaattaaatgtattaacaataaaccagctttctccctgttggaaaaggggttaaaagtatagaaagtatagtagatctggacctctgtgatatgggattgaaactggagatatgtgtataaatatctggttttcaatgtgtaaagatagatatagaaataaatacagaggcctatgtgtatgtgtacatatgtgaatgcacacacaatataaatacatttttccatatagctctttctgctgagagaaactgggaacaacaccaccccaggaacaatgagcacatcatatgcataccaaggggccctcagatcttgttttttaaatgtcattttctacaaaaaggaaccaggatccttggagaaatggctgattccaagggtgatgcaaggctagtagcagatgaattcaaagcatcttgttccaaaaagcaaggaagtgctcaaagaatgatggggcatgtcacaaggacacagcagccagctttaatgaacttccattggccaaatggagggcaaattgaggatctaagtaaattatgatagtaacaaattataaaccattgaatgaaataggaaaacagtagtccatgcttatgtaagcgaataaaaaaagaaatggggccgggtacggtggctcacgcctgtaatcccagcactttgggaggccgaggcggacagatcatgaggtcaagagattgagaccatcctggccaatatggtgaagcccgtctctactaaaaatacagaaattagccgggcatgttggcacgcgcctgtagtcccaggtacttgggaggctgagacaggagaatcgcttgaacccgggaggtggaggttgcagtgagccgatatcgcaccactgcactccagcctggcatcagagcgagactccctctcaaaaaaaaaaaaaagaaatggaaagtttgaagagatggtatattaacatggtttcaaagtacctctccacaaaataatgttacaatggggaggcttgacccatcccaacagtatcatgtgttggatatgactgtcatcaataaaaggacaaattgataggattcaatgagaaaaatgcaacatcacttttgtgttatttctcccaaagatgtctgaatttaatcctaaaccacaactgaggaacattctacaaaacaactggcctgtaatttacaaaactgtgaaagtcataaaagataagagaagactgaagaagactaaagagacgtgaaaaccaaatgtaattgtgattctaaattagatccttttggtagaaggggtattattgagactaatggaaaaaccagtggggtctgagaattaggtggttgcaatatatcaatgtaatcttctcattttaatggctgtgttgtgtttaggcaggagaatgtccttgtttataggaaatatccattaatatattctggagcagtgaggcatctggttagcaactgagtatcaaacgggtcagaagaaaagtcagaagaaaatgggtcagttccttatactgtaccttcaactcttctgtaaacatgtgtgttttaaattttttaaaaaggaaaaaagtaaatacattttgtttaataatttcaggagatatttcacttttgcatttttaaaaaatctaccctaagacaaactttatttgtagtcatggacattttttctttttgaaagtagtgaacaatttagtatactgttaatatacaacttaatcttaaatgaaatatctttcccctaacttcttcaattgaaaataggattatttataatcccttaattcacatccacaattcttaattgtgtttcctttgaaaaggataaaagttgatacatgaaagctaggcaagtattaaacatttatagaactcttttaaattagtttagtctgttctcatttggatctggaggtttgtcttttcataagcaaattaggtgcatctataatatacatagtttaaaacatttatcatttctatgtttggttttgtctcaaagtacagataactttagcgctgggaagaaatgagacaatcatttaaaaaatattttcttgcttgggaataccaactgtggaaagacgtcaaaacaaaatttaaaaatgtgatggatggaacaatgggatctacactctcaaaagccttcttttctttttatcaacttcttataattttagaaaatgttacataattcttaataccttgaactccgatcataaatattaaacattcagacagttttttttataagtatgtattaacatattatttaaaatatttaaaaccatcagtggaaagaagcggggaaggtaaattatttgattatgactgaaataataattctaatattatatatatataagtacctataataaatattaattaatattcctaatcattgaagtattttcaacatgagactgctctctgttgtagttaaattgaacatattttaataaaaaggttgaggtcagtttgtaagttcattttgttttttttttgagatggggtctcgctctgtcgtctaggctggagtgcagtggcatgatcttggctcactgaaacctctgcctcccgggttcaagcgattcttctgcctcagcctcccgagcagctggtactacaagcacacgtcaccacatctggctaatttttgtatttttagcagagacgggatttcaccatattggccaggctgggcttgaactcctaacctcatgatccgcctgcctcatcctcccaaagagctgggatgacaggcgtgagccaccacacccagccatgagttcatttttcacattgccataaattatttatgctgtactttctatagcattttttaatcataaaaagtatgactcaatctatagcattaatcacaatagtaattaaatgaatatttgtgtaacaattgactctatttttcccttgatagttcgtgtattccataaggacagggactactgacttgtctatattctatttctacctcttagcacagtttatcagatcactttctcatgtgttttacattttttattgtgagctcatttttcgggcagggggcagtttcggaagtgcagagtggttttggtttgcttctgataggcaccctagtagaattaccagtctgagatctacttttatattaatttcacagcttgggaattctacacttgctgtacaatgtaaatttgtacagcaaatttttcatttctcataagagctttttattgttttcacttttacagggatgctcttttttagtcctttccttgggctaagtggagctttctaacttccttttcactgacagtgtagcattgtgaaagtcctggatttatttgaggttctcatttccagctcctaacctaggccttttctcaggtctctttcttggcattcaaaccccagacccaagctcctagtctgacgtccaagaaaatttctcccctcaccctcattatttccctctaaccctaatttccaggatgtcttagcctcaacttttactgttctggctttcagtttccctttcttttcttgctcctagaaattcctctctctttcttttgactgccactatgtatttaaactggcatgaacaatagttgaaaccatggatggttccatttgaaagaagaatgtgtcgggaggggaggaaagtgacactttccggagtcaggcacttttatactccggacatttcccaaaccctgggagatggggctgcttgtctggcttcaggattgtaatagcagtttcaattaggatccccctggatggtctataaaattattgggagcattctgtatttggtagcattctgatgattataggttatgaaaacctcttagaactggctaaactgacgaaggggattttatctttggcttatttgatgtctcacagatcctaagggcaggaaagcagggactagaatttggaggtagaatttggaggtagaaggctggtgggaattaatggaattatgggcatcaaggtacacagatgagatgcaggatgcctctgatctctgattctgaatcaggatcttgtgaaacccttatccagttaaggctaatgggatcatttctcctctcccgttatccttcccatttttgggagactctgattcccttcatgtctctcgctgcttctgtctcctgcttttttgcataggaatggttggttcctcatattagcctttattactcctcgtaaagagattgtctttccctggctatttttgtctctgtcccctcttcctctaggaaggccctgttgagtttgcaagagtttaacttccttcttaatttagtcatttcctatctatattttctgtaggttcagtaatttttgctcagtttgcttttagtttctctttgtcttctggccatgatctttgccaacttgctcttctagacttcctttgtgaagtctcccatagtgagaaatatgagtagattttgggtctgctgaatgctttcatgttcaagtaaatcttgtctaccattatcctcctgagttggctaattcctacccagaaggtgttctcctctcaaatccgcatctaacctaggcttggactcaatctattatgggttgcccagctcccttttaaatatttttcatttttgctatgtcttctctttttcctaattccataaattttctattatattacacacacagtacttatgtactcacctataataactgtgtcaggctgaaacttgatacgtaagaattattggataattttatgttgattttccagatcttaccctgttcaatatatccagattttcaaaagctgcttggcatagttgtccaatcttttttttttttttttttctgtttttgacagaatctttctctgtcacttaggctggagtgcagtggtatgattacatttcactgcagccttgacttcctgggctccagtgatcctcccacctcagcctcccaggtagctgggaccacaggagtgcaccaccacgtctggctaatttttgcatttttgttagagacgagtttttgccatgttgcccagggtagtcttgaaaactcctgagctcaagtgatccacattccttggcctcccaaagtgctgggattacaggtgtgagccaccttgtctgaccagttgtccaatcttttaggcatggttcctcagttgtttttacaatcaaatgtctatctgcagcttttaaaaaactgccttttagtaatttatcacatccttgaccttttggggacagacaattcatttgttttctgagaacttgtctttcttcctctgtttgatttctttgggttccagccatactttattgtctagtagttatcagaagcatctctctctttccaataaactctttaagcgtattagacctgggtgcaactccttgctcgtctatatctatccacacagaccttcagagtctcactttttccttcttatctgctcagcctacctgctcaaaactcaacccttctcttaaggaaacttatgtcttcctctaatttagtagtttagtcaacactttttctgaaagtaagactgaactatgtttttcaaaccattccagatattttttgacctcctgagataaacattctgtagagacaggatgtttaatgcacaggcctttgaattgcctttttagcctttgcatttgcaaaagttttattgagttgtgttcctacttcaccccaagaagaaggaatacatgatgataaagccttgtatatttttgttttcaaatgaaatctaccagctgtagaagggtaaatctaccagctgtagaagggtaaatctacagctgaatccatgaattaggtctatgaaatctagagaccgggtcagagattatttgtttaacaaatccagagtgaacttaggatcatgtgatagagggtggctagaacctgtgaacaaattctgtgcatcttaaggattgagatctccccttctctgtttctttccatggccctgaatgtagcttaaaacaacataaggaggaatagaatttggggcagcctttcttcagtttaatacttattttaagactggcacaaatagtcaaaactagaagctcacatctacttcttgagaaccaaagaatctcagctgttttgtagtttccaggcagcaccttttgtcctgttcacctccagaagctaaaaacttgatcctacctcagccacagctgaaacactgggaactggcataggctgcagagactgtccaaagtctaaagtcctacatggaccatgtttggtatgggtccaccaaggcttaaagcctcatgctgtgccagatcaagaaataatcactccatgtgtgttgttctaccctagtaccactccatactctctcaagactcctggttcaagagtagtatatgttagttatatattatatatatatatattttgttatatatatatagttagtagtatatgttttaaaggacttaatacattctgccacttctttttgattgatattcgattgatgttgacattcaaattctgtgttctttgtgttccaggtagggtgatgatcacacacaattaagagacataatgattattattttttaaatgtcccatacctctgtggaaaaaaggcataagatttagtacttacctaaagagctagtgtttattaatgcctataggaagggtaacagtttgcttacttagggctgtgccttgtatccagagagtcaagctgaccacaccgtattgctcaatagatgattgctgaatggcccaagtggttctcaactagggaaggcagtactctaaagaacatttggaaataaagtaggagctatttgttggtcacaatgagtgtgtgagtgtgtgtgtgtgtgtgcacgtgtgtgtgtgcttgtgctatggctggcatttattaggtggtggccagggatgccaaatatcctgcaatatgtgagagagtccatcagtgaaaaattgtccttctcggaatatcaattacattgcttctctttggcccccctcctccttcaaccaacagacatgtgctttgaggctcattggaataaacgctcaagaaatactgttgtttcagtgcaaaagttcacactgcacctatggttgatttgttgttgtactttttacatgtctgcattaccctagtcatagggtattgaagtcacctgtgaagctgtatatcttcttggaggtaggctgttaactccttgaggacagggactatgttttcttcatctttatagccctataacacagaatagatgttacataagcatttgtggaataaaccaaattactgggattttaacatgtcacatagacgtgttttgtaatggaaacctcaacacagaatttctcatttttcaactagaatattcatggaactatagcaaaacatatgatgaatgttaagtttggaattcatcttttgctttaggtattcagaaagaaattgctgcttcatctaatgcataacatcattacttgtattttttcactgcaggattccttttcagcaggtaggttcagtaggttaattgttttcaacatctgtttatgttttactttgcattgaaatgcctgaaatgaattgttgtagagcataaaatccactttgtcttctatgctttccctgattattttcagctgtagaaagtcaatcttttaattcgctactcactttgacaatctgtttcaatttttaaaagtcacaacatttccattgttataggattagtgagtcaattaagtttctaagatttgcacaaattcaggagcctccttagcgctaaatgaaatgtgggtttggctttatgttaactgtttgactcctttggattttgccatagctttcttagagatgtagtaacgaataatcaagatgtgaaatttagaacatttttatcaataaatatcaaatatttaatttcccaagaaatggataacccaactctctttccccccgtattctctattgttttaaaaaatataggctgaaaaactgacctttaagactctccaatatatgcagaaagagttctgatattgtatatacctaaaaggaaactttattactttaaactttgtgtctttcataaaatgatagtattggcaagtttgagattgagggcaaagtcatctccaaaaaggacacaggatcctatttatctatcttgtctggataatgagagcctactgtttcttcccaaaatcatcttctataactattacagaaatatgaccctcctacagtgctctgaagaaaataggatttacctaaaaggctaaactattctcctgttgcctctgaagatatctcctcatttaaataaagataataactttcctccagggaaactaaattgagcaagctctgaactatgtgttaaaaaaaaatcaggactcttgagctttctgaacttgaaagaaacatttttttttcatttttcttttgctttactaatttcactttacttttggggtatttgtggttggagaaagacctttttatgccttatttgcagatacggagatacggttaagaatggaagatgactttataaggttacgtagattttcagtggctgagaaagtattgtacaagttgcctttgaaacattccaatctcgtctctcacagttcagacttcagctaaacaatgtatcctcaaaacagaaacactaatgttatatggtgcctgcgtactgggttattattatctagtctccttgataggatacatattttgttggtatttagtctccatattgaatctacattctgggatatgtgattctgaaatttgggagaggactatctggtgctgttattttgttaactttcaaagggaaaatgtgggcagagttggcttgcagtaccatgtgttctggtatgaactgagtaatttcattttgagagactgcatgagttatttaaacttcatatgcttcaactacatgccagaaaatgggatgaaaagacttactgaaaaccagatgcgtgttctttatgcttcctgggatattaaaaacaaacatcacaccaaaagacatgatgattttggaggcattttgcttgttggttgagtgagagctattattgcagagaattgcagatgcctggcttgagaactatccacattattaatctgttactcaacaaatctacttttaattcatgtgaaggtcactttcataatttcttaagaacagagtgggaagcatctagcactgtccatttttcatcttaaatgagggggtaacaattgactaatttttgctctacggacagagtggagatgggttggaaaaactccatctctatgactgaaaaaagaacacaaatcacattttggcataatgattgtgcaggacaaagttccaagttgaatatctagccgcaagtagagtctcagtgtctgcatttctttagattcgtgagtatattaatatgtgacactgtaatgcccccacagtgtttagagggagcttctgtgtcctgtttaggacacaccagtaggagtcactttattatccttgaggctggtccttgctttgctgaaatggaagagtatatttgcagtttatcatcttcctacctaaagaattaaggtactaaatttgtctcaagccaatacatagtgttgattttggatgatttttttctttttagttgtttgtttttaacattgtaagcaaatattttgtgataagacaaatggtcattgaattctgccataattttgcatacaatcccatctattaaaatgaacattctcattttggtttgagaacagtttgacattttggcttggtaatatcagaaacttcaaacaataaatagaattttagctaaatccaccagattggcatatgaattaggataacctctagcaagtactgtttgtacatctaaataaagttcacagactgtgttgactaaccatcatgtattaactaagtctacatagtttatttaagaacattttggtatttaattttggtaagaataattttggtatttaataaaatccatggtataatgtcacattaggcagacagaattaatcttcacatttcaaaatattctgcttatcagaaacagtttaaattctgcctcaagtttgcctgatctttgatggcaattaaacaaatcttgtttaaaataaaaatatcaacatatctctatgtctgatgctgtaccttaagaaatagcaggctgatgttaatctctttgtagacaatttctctgagtgcatattattgctttcagagctaaagacagcatatgtttggcaaaaccttggaatggtcaagggataggttttgttttgtttgtttttaaattaggtattgggagaaataaataagcaaggacttggactatggtttccaaactgtgtgctgttgtattccaggttgctgcagtgactcaagggactttgctggatatttttagtttttgaggcaaatgcagcgatacttgacatttattggtcatcacatgaaatactagcttgaggtagctcacagtttcaacattagattgtgctatattccttttgatattgtcctgtctccacaaagctgggttcttggcggttgctatgcaaaagttgtgctatgaaagaatccatgtggagcaggcaatgaggggtggtggtgtctgatctgattccaaggtgtaaggagttgtgcggtagtcaacaggtgtacacatcatattagtatgcaattgtggttattatttatatttttacttcttgccaaatacattttctacttgaaggatttttggatgatttaggaatagactctgtaagaagtagttatttgcataattatgtacaaagtaatttttatttaggaaatttaattaattcatttattcagtaagtgtttatccactaactcctgaccgtgttcaggtactgttctagatacagagcattcactgatgagaaaagggcaatatttgcatatatagcaagaaatagactgaattggtatgacttctgctatgattgtgtttttaaagaagcaggaataaatttgtactttctagctctaaaatcttatgagtatttgttggttcctatagtctatgatgcatgttgtggtactctttcagcttgaatgtttctgaaactagtgctttcctttctcctaatgtagtgcatatagtatttatttatttatttattggacccagggtctcgttctgtctcccaggctgcagtgcagtggtacgatcttggctcactgcaacctcagtctcatgggttcaagcagtcctcccacctcagcttcctaagtagctgggactacaggcaacaaccaccatgcttggctaacattaattttttttctttttgtagagaatgaggtctcactatattgtccagtttgaccttgaactcctgggctcaaataatcctcctgcctcagcctcccaaagtgctggtgttataggtatgagccattgtgcccagccacatatatagtgttgataattttttttctactttgaagattatttttatctttcaaccttttctggagtaactttgcactacagcaacaaatagttttgtctgctaatttaccccctgtacaattatatcatatttcattaaaagccctgatgaagagattaaaatacaattttcttaaaagaatttatattttagtttgattatcaaattaaacatgcaaatttaaaaatacacatatatgcagatatacactgatacactacatcaggggctcacatactttttctataaagtatcagatagtaaagattttaggctttgagtaccatatgatctctgttgcaactactcaatgttgttgtagtagcagcagagcagtatagacagaatataaacaaatgaacatggctgtatccaataaaactgtatgtacaaaaatactaggtgtgctgagtttggtccatagactagttttctgatccctgttctatatatttaagatgtaaaatttatcccaaaaggtaatccaaccaattagaaaataatcctcggctgggcgcggtggctcaagcctgtgatctcagcactttaggaggcaggaatatttgaaaggacaaccatccctgatagatgaggactcacctttggtcaggggtattcaagtaggtgcaccccccagctagaacctccaaacaagctctcaaatattgtctgccattcgcagatgtggatgtgccctcaggaatgcaccatgtgttgacaaagtcaaatgctgcctgaaggtaaaagagggtaaagacttatgtacttgaaatgtcaactataatctccttgacctttgcaaacttgataaaatggactcaaaacctcgtacaccctaatgtaaatccaaagccctccccagaacctctgggtgcatggttctcatgatcagctctggttccaggctctgcattcttgaattagttcagctttggggtcatttttcacgttgttttttctcatcatgcaaagataatacagcctctttcttactctggctatagtgtggagaacaggttagggagtgcatggataaatataggtaaaccagataggaggaggtatttgcagtatttcaggagagatatgtttatttttactataatgtagcatctatgagactagagagtttcgttttgcatattaatatatcccaagtgcccaaacaatgcctgacacatgatagttgtgcaattaccttttttgagatcacaaaccctggaagaataccagatatggggatgaaaattgtttatttggttccagacttgttgagtttgagctacttttacaacctccaatgaggagatgtcaagtggtcagttgcatataatgcaatcttcctctggagatcagaggaaagatctatggttgttatttaaagatgcgagtcacctatggagggctgctaattgaagttaaatgtgtgggtgacattgcctggggagcgagtgaatgtgagaattgagcctacagaaagagaaggaatgaccagagaggtaggagaaagagaagccaaaggaagaaagtgcttcaagaaggaggaactggctatctgaaattttgacctctcaaatgataccaagatagcatacacttgtggtacaatggtacactgtgccagtgtacattatataaaacaacatgacagtttttaaaataaatgtagttcttaagatagaagaaacacattttcagtaacaagattagtaaaacataagaacatttggaagcttgaggtgggtggatcacttgagcccagaagtttgagatcagccagagcaccatggtgaaatcctgtctctacaaaaaaattagctgggcgtgatgtttggtgcatacctgttgtcccagtcactcagaagactgaggcaggagaatcacttgagcccaggaggcagaggttgcaatgagccgagatcatgccactgcactccagcctgggcgacagagtgagaccctgtctcaaaacaaaacaaaacaccaaaaacaaacaaacaaacaaaagcccaaaaccaaaaccaaaaataaaaacaacaacaaacaaaacacaaaagaatgacatgctttacaaatatgtgcaggtccaatcagatgcatcgttccctacccttgccatggaatgctgtgcctgtgctcagcttagtttcaaggctgaggaaggtgcttgtggaagagggatgccatttgaagggaggattgtttagagtccattgaaacaaagcttaaggatgattctggttgtttatttcacctggcatttactcaacagtgaagtctgagagttgccttgtgttcagaggaacctccaagggcctgtgcataatgtagcatttgcaacagtcctaagtggccatgagtgcaagaggaaagttatgcaagttattcaagaagaaagtgttgaagtattgaatttctcctacctatttcttcctcctctccctttgaaaaaagcaatcaattctctggctgggcgtggtggcttacacctgtgatcccagcactttaggaggccgaggcgggtggatcacggggtcaggagttcgagaccagtctggccaacatagtgaaactctgtctctattaaaaatgcacaaaaaattagccgggagtggtggtgtgtgcctataatctcagctattcaggaggctgaggtaggagaatcgcatgaacctggaaggcggaggttgcagtgagccaagattgtgccactgcactccagcctgggcaacagaacgagactctatctcaaaaaaaaaaaaaaaaaaaaaaaaaagcaatcaattctcttgtcactgaagaaaatatttggtctaatcatgaatattgtttttggaggtccagtacttgatatctacttagatgacatattaaaatgggcctctagcattttctccactgactctttacttataaatgctaaatgagatgtatctggctccaggagtccagatggcaatgagccaaggttattcctataatgcttctgtgatcaccttagcaaggaagcttcttcactgttgtagaagttaaatactttgcaactttttttaactcgtaacagacttgttcaggggtacttttctcagaattatggctgattcagggttgctctctctacaatgtcttacgtgatcttccagcaagaaatcgtatttctatcttttgaattcttatatcactttagctataagtgtcatggtgcttatcatttgctaccttgcaatatagtcatgtacatttcatctctcctacaagactgtgagcttttgagagacagtggtttgaagtcattgtcgtatccatcactattattataattagtaggtattcaataactaagtaaaataaacaagtatcaacttgtttctgccactaactttgttggcctgtagtcccacacttttatttattgattgatttttttgtaggtaagtgttgtacacttatcttcttgaagatcaattgtcttcttgaagatcagttgtaaattaactataaattataacacattggctggtagcttaatccaggtacaatggatcagtaagacattaacctaggaaatgaagttcttctcaagttaacaacacaagttacttcaaataatgtctctcatggagaattcttaaaattacagaaggtgtcatcatattatgtagtgaacactgcttgcaatatgggttagtgaacctatattcccttatagagagaataaagcagaaatgggaatcacatatgccttgcaattcagaagaacccttcaaaattgcctttgcatccacgggaaataatcaaatactcgtcaggaagtcctgagaatattacagggccattgtgttagaacaacttcttgattattataaggctctttctcaaaggtcattcatttttttaaaaaaagtttggtatttattaagaggaagaaccaacaaaacctggtgatgtacggcatagggggatgatgaaatggggagtctttggactccactccccatattggaatggaggaatttctgtaaacataaatatgaaagtcaggagaagaactagtttgaagatagagagagagaaggttcgtcttaattttggacttgttaaaaagagacgctgctacccaccaggcattggaaatatgtagtgtaactctgaaaggagtacaggatgcaagagagattcaggaggtagttacactgaggttatagttcaagttctgaaactgtcagaggagaaaatgcagtcagaagtccaagagagaatcatgagaaatgccttcattaaggagactcggagagtttcttgtagttattcaaagcccttttagtaccatctcagatgtttttttgaagtcactgctttaagctagccatctgtaataaatgaatttccagatatcatttctggcaagagattgaactaagcaaaatttgaagcatttgaagacaagaactttatctgaaccgtcgttgttgcactttgacatcctctcacacaggatgggctgcaggggtagcatgggcagccgaggatgtcctcagagttgttagcgtttaattggcaatcaggcaggctcctccttatatttcaacttgtcactaaatgcatggtcagtaacagtgagcctggctgaattattaatggccaaaaacttattttatccagattcattcacatttggtttagactaatgagacaaaaaagaatgaagtctggataatattctgtctacacctacttaccaattttttatcactgtattaggcagccttcacttctgtcatagctttgggccagggtaaggttttgccatggtcattcatagccctttggaatcataccaaattgacaaatatgttttaaaaaagcaaaatgggatattgttaaaagcctatgtacttccgaaaaatgtttcagaaatagatagtttgctcttccctgaatgtagatgtacagttatctgttcctttattggcatgatttgttgactaagctcatttcataccctaaaccacaaactgtaaaatctttttggaatgtgctgttctaaatggatagctgtaacctaaaatttcataccatgtattgtaaaactaaaaccatgttgcattttcctcttttactttaggtcttgagagctgatgacaataacatgggcaatggctgctctcagaagctggcgactgctaacctcctccggttcctattgctggtcctgattccatgtatctgtgctctcgttctcttgctggtgatcctgctttcctatgttggtgggtgaggccattattaaataaaaatgaagttaaagtgaaaattagcatgatctagaagagtgatttctacttagtacttatttaacccaaagtgtcagtcaatgagaggattatcttttgatgacgttatgcaaatctgcagtttcagctactgtaaccactctactggttattattattaatattaatgaatgagtttatgaatttaaaacatttaaggaatgattactaggttgcaggcattttgaaagttcctgagaactccaggatggttaaattagtcctttcttaggagctcacagttgagaggaagtgatgattatcacacaaggcaacacgtgtttaagatagaagtgtatagacaaggtcccatgggcacattcaaagaaagcatcatggagagttaatgtgttaacttcggaattaagttaatagaaatttaggttagaagacagtagttcaggagtcacatttggcagagaaaataactactgcaaaactataaccccttgaaagatgaacatagatttagaaaactgggtgaaaatttggcagtggtgggaaatgcagctagatcaataaagtccaaattaaacagcatcttacattttcatactaaatactaaggaatttgggctttagcttttagatcactggttttcaaactctattccatggtaacaaggttctaaggaggagacttaaggattgcacaaatgtttgctttgactttcattaaaaaaaaaaatcttaaaaacacactcaaactaaatattacataccacatttttaaccaagtaaaaaccagaaaccaagtaatatgtgctgacaggttaactcattagttagctcattagttgcatcttgctatctttttctaagtgaatgatacttaaagtttgaaaagtgaactttttggaaaaagcaataaactattatcactggtggctacctaatgatatgaatcaggatttcaaaaaatatgtgcaatcaaataaaacagagaaataaatatcaagacgatgctgatctaattgcattgccaatgattttgaatttttaagttttgccaaacctccctattattttcttactggtttatagaagttacacacttagatcttataaagtaagttaaccacaataaaattcagctcatatctattaatagatattaggctttttatgatatttatttgaaaataacattgatctgctataaaaatgattacaaaacactgctatgggtggtggattaccactggaggatctttccaagaaaggagaactctgattattttacatttgcaaaaggcggtagaactggatacactacagagtactggaggcagaaagaaatgaaggcagagggagaccagttcggggctctgactctggtctaagtaaaaggtgatgagtgtttgaaataaggcattggatgcattaaaatcaacagaaatcaagactgattggattttggtgtgagggagagaggagtcaaggctgactcctggatttctggcttgggtaaccaggttttttaaaaaaaatgtttgtgggtacatagtgggtgtatatatttatgaggtatgttacatactttcctacaggcatgtaataagcaataaccacatcatgaaaaatgggctttccatcccctcaagcatttatactttgtcacaataatccaattatactctattttttttataatccaattatactctattattattattattattattatttttttttttttttgagatggagtctcgctgtgttgcccaggctggagtgcagtggcgcgatctcggctcactgcaagctctgcctcctgggttcacgccattctcctgcctcagcctaccaagtagctgggactacaggcgcccgccaccacgcccggctattcttttgtatttttagtagaaacagggtttcactgtgttagtcaggatggtctcgatctcctgaccgcgtgatccacccgtctcggcctcccaaaaatcttatatttttataatccaattatactctattatttttaaatgtacaattaaacttctatttactatagtcatcctgttgtgcaatcaaataatatcttattcattctttctaactatacataatttttgtacccattaacaaccccccccctccccaccccccaccatccttcccagcctcagcctctgataaccatccatctattctctgtctccatgagttcaattgttttgatttttagcccctaaaataagtgagaacatgtgaagtttgtctttctatgtctgacttatttcatttaacataataacctccagttccattcattttgttgcaaaatgacagtatctaatcctttttatggctgcatagtactccattgtatatatgcaccatattttctttatccaatcatctgttgatggacatttaggttgcttccaaatattgacgagtgtgatcagtgctgcaacaaacatggaaatgcagatatctatttgatgtacagatttcctttcttttgggcatatacccagcagtgggattgctggattatatgatagctcaattttagtttttttgaggaatgtccaaactgttctttatagtggttgtactaatttacattcccatcaacagtgtacaatgcttcccttttctccatatccttaccagcatttgttattgcctgtcttttggatataaaccattttagctggggtgaggtaatatctcattgtagttttgatttgcatttctctgatggtcagtgatgttgagccccttttcatatgcttatttgccatttgtatgccttattttgaaaaatgtctattcaaatcttttgcccatttttaagtgggattattcgattttttaaaagaaagttgtttgagctccttataaattctgattatgaatctcttgtcagatgggtagtttgaaaatattttctctcattctgtgggttgtctcttcactttgttgactgtttcctttgctgtgcaggagctttgtaacttgatgggatcccagctgttcatttttgctttggttgcctgtgcttgtgtggtatgactcaagaaatttttgctcagaccaatgtcctaaagtttccccaatgttttcttttagcattttcatagtttgaagtcttatatttaagtctttaatccattttgatttgatttttgaatatagcgagagatagcagtctagttttattcttctgcatgtggatatccagttttttaagcacaatttattgaagagactgttctttccgcaatgtatgttcttggcatctttattgaaaatgaggtctatgtaggtgtgtgaatttgtttctgggttctctattctgttccatcagtctgtgtgtctgtttgtatgccagtatcatgctgttttgtttactatagctctgtagtattatttgaagtcaggtaatgtgattcttccagtttcattctttttgcataggatagcttgggctatactgggtcttttgtggttccatataaattttagaattgttttttctatttctatgaagaatgtctttggtatttggatagggattgcatggaatctgcagattgctttgagtactatggaaatgttaacaatattgattcttccaatccatgaacatcaaatatcttgccattttttggtgtcctcttcagtttttttcatcagtttttagttttcattataaagatctttcactacttcagttacattaatttaaagtctgggcccatttgtgtccatttttcttgggaaggtgtttcaggtcttctaagggacttgggcctgcgaccctataatgctgcaattcttgaagacttctagagaaaggtactgccttggtggtcctggttaaagtctggaagaattctctgaattgccaggccgagactctcgttctttttccttactttctcccaaacaaacagagtctctctctctccctgtgctgagccttctggaactggggcaggaacacaacatccccatggccactaccactgggactgtgctagttgagacttgaagccagcacaacactgagtcttacccaaggcctgctataaccactacttggctaccacctaagttcactcaaagctttagagtctacaatcagcaggtggcaaagccagccaggtttgtgtccctctcttcagggcagtgagctcccccaggcctcaggtgggtccagagatgctgtcttggagccacggattgaagtaaaaaaccttagaactttagctggtgttctattctactgcagctaagctggtactcgaaccacaagacaaagtccttcccactcttccctcccatttccattggccaaggagtctctccctgtggccaccacaaccaccaacccatgggggcttttgccaggccaccactgatgttcacttagagcccaaaggcccttcagttggttaatgatgcatgcttccaggcctgggactcactcttcaggacagtggactcctctctggcccagggcaggtccagaaatgctaaccaagagcctaggcctagactcagggaccctaagagcctggttggtgccctaccccaccgaggccaagcagtcacctcaggtgccagagagagtcccctttacttttttcccctgcttttaatagaaagagtctttcaccatagccaccacagctaggaatgtgcgaggtcacatctgaagccagcacatctcagagcccaaggctctgggtattgctgttgggtattcagggccatggggctctttggtcagcaagtgctgactcctgccaggtctctgctgtgacagatcagcactgagttcaatgtaaagtcccccagttgctgtgctctccctttaccaagcacaccgatttctccatgccacacacccactgctggaggatgaaggagaggtggcacaagcactcccttagccacctagcttgtgtctcagtaggtcatgtgtctcccagtccaccggctctgaacccagctcagcactagggcttgcctaggaattgcagtccttgtggcctaggctgtccctcaagttcatttaaagtcccagagcattccagcctgcagtggtgaggctcgctggaactcaagctctcaccactgggatgggcaattaccctttggcctgggcctgtccaaatgttccctctgctttctgctgtgacagggcagcactgagctcaatgcaaagcctcataattgctgcactctccctctcccaagtgcccacattctccaagctgcatggctactgctgggggatgggagaggatggtgtcagcattcaagactatctttcttgccctctttactgtcttcttcagtgatatgaagttaaaaccaggtattgtgattgctcacctgatttttgattcttgtattagtgccttttgtgtgtagttaattgttaaaatttgctgttcctttggggtgggggaccaatgctatagacttctatcaggcctcttgctctgcctcctgtatctaaccaggttagttttgatactacctgttaacataggaagtaaaggtgcaggagtctgatacaggcagatgaaataaagattggaaggttgatttgtgtattagagatacttatgggacaaccaaatacaatggaatcatagttgaattcaacagtgaaagcaggtcaagaaatggagaaaaatgagaaatccaacatgttgctttcctaaggagtttcaagagaaattgtgaccaaatatgatgtttggcttctgtgacagagcagcactgactttaaaatttaacttccaagtcattggcataggactgaagctaggggatccaggagggaggttgagaagggaggtctgccatgcatgcggcagtctcagtggcagttgaagcagcaggagtcgatgaactctgaagagaaaatgcattaagcagaagctgagggcaatgctctggaggatgctagtgtttaaggggaagacaaacaggagggaaaaagagatacaggaagaatagtcagagaaggaaaggaacccagaaatgctggctttcacagatgccagaggtcagagggtgaccaagtaagaggaagacagaacgagtgccccagcccaggaagactgagggttttctgtgggagatttagtcgcttcttgctctgtggtgtcaactgtggcctgctctcaggctaagacagtaaaccgtcctgaaactcgtctctgccactctcttcttaagagtcaacacccttccagacctggcctgcttctcctccctctccagcgcccttcagtagttgtctttttgtgttttgtccagagtttatagttattatccctggacagatctgtctggtaggagcttcctcagctataccactgtcattttaaaaagtctgtcatgagactatgttcattggctcacatgctttgaggaacacttcctttcattctcagggtctaatgctaatataaaatgtaagtacatttaagtacgtctgtgcttagaggcctctgaggagagggcaaaggaggaatgctttgctttaagtgggttattcttattaatttaattaattaattattagttaattaataatttattcttattaatataatataccattcaatccaaccatttaaagtctacaattcagtagtttttagtatattcatagataatgtaaccatcactgcagtctgttttaggacatttttgtcatctcaaaacaaaactctgtaccctttagctaccacgcaatctctccccatctcctcacccctagccccaagcagccactaatctattttctttcactgtagatgtacctattctagacattctgtatgaccatatgtggtattttgtgactggcttctttcccttagcatatgtttttaaggtttactcacattgtagcacatattaatacttcattccttttaatggctgaacaatatttcattgtatggatataccatagtttatccatttgtcaattgatagacatttgggttatttccaccttttggctattatctataatcctgttatgaatatttgtgtgtatgtttttgtggggacatacattttcacttctcttgggtatataccaagagtggaattttgtgtcacttatgtaactgctcctatatgctattttgtttatatgtaggcaaactttaggaagtgggggttttcccacgcatcttcaaaatcattcttttaacaattcaagatgcagaaaacaaataacctcattataaagtgggcaaaatacatgaacagatgcttctcaaaataaacatacaagtgtccaacaaacatatgaaaaaatgctcaacatcactaatcatcagagagatacaaatcaaaaccacagtgagataccatctcacaccaatcagaatggctattacgaaaaagtcaaaaaacaacagatgctgttgagaaaaggtatgctgttggtggaaatgtaaattacttcagtcactgtggaaaaaacttttgagatttctcaaagaacttcaaatggaactaccatttgacccagcagtctcatcactggggatatagccaaaagaaaataaatcattccaccaaaaagacacacacactcatatattcatggcagcactattcacaataacaaagacacggattcagcctaggtgtccatcagtggtagattggataaagaaaacatgggagacatacacacacacacacacacacacacacacacacacacacaccccatgggatactatgcagccataaaaaagaatgaaatcatgtcctttgcagcaaaatggatgtagcgggaggccattagcttaagcaaattatcacaggaacagagaaccaaataccacatgttctcacttataagaaggagctaaacattgagtgctcatggtcataaagatgggaacaatagacactggggactactagagtctactactagagtctcatggtcataaagatgggaacaatagacaactggggactatggaggagggcaagggttgaaaaactgttggctactatgctcattacttgggtgatgggatcatttgtatcccaatcctcagcatcacataatatacacatgttacaacttgcacatgtacctgaatccaaaataaaagttgaaatttataaaaaagagaaaaaaattaaaaacattcttttaataaattctgtaccagatgatttaatatagccatattgaagtaatatctgtccaaataaatattccttattttgtaactgagatgtttgttgttgtaatgagcaatacaagcattttatatctttgttttaaaaacctcattaaattgcttactttaaaaaatgctctgtttggtttgagtttataactttgtgctcatacaaagttttgtagttatttctgtgtacattagggttgctaagggatgctgagatatcagtggtgtataaataacaggagctctagcttcaaaagccaaggagataataatgagaagattattgattagaaaagataaaagccttatgctaacaaacacagatgtactacgtgtctctaattttgtctgttgtggtttccctcatgcaaaaagtcaagatggtaaaacgatttctgaagatacgagaggtgggttgtcaaataattgtattagcagcaggctatagaagaaagcagtagtaaattgtttttcaacccaaccactaaactgaagctagagctacaaaggttgtttagttttgtatttctcaactcggcagatagtctgagttgtccatatggttccaaagatttggactctaaaacaaggactcaggttcttcaaagagaaattgaaaaataagaaagttaaattatatgtagatttttatttcattagttatagtctgatactgatggtccatatgacaaagaagaaagagcatgcaacttggcactagaaagtctggctttagggttttactcttccatttactagacatgggagtttaggtaagatgctttattttctacatgagataattcttttttgtatcacagaattgttatggaagtcaaatgaaatgtttgtgaaagtgtttttataagtgataagttcattatagtagtaaagaatttgttttatttgattatgaataattatcatcagataattattttaataaatagtcatattatacccaagtaacaattaactaaacatgcattttgtctcacattaactctgtccataagaattaaaacctttgtgctatgacctgttgtcatagtaaccccatgatccataaccccatagccctagaatcaggctgttgctgcaagatatttgaattgcctaaaagtagctaggaagaaataaagttgaccaacagttggatttgtaacgtgatggcaagtttgacaggccttttattcttaggcctgagatttactttcagagactaatttctttcttataagaactaaacctgcaatggtttgtgctgccttcatgtgacaacaagtgtcactttatgccatagagtactttgagattgaactgataccttcctcaaattttacatatacatatataattatttactatattataaattcacaatattatgtattataattatatattatattatatattataaatatacatcatcatgcaacatttaaagtaaaattattttgatatgttgagaaacatttaaaagaaacaaaattagctataatgtaatactattcacccctttaacaaatatgtattgagtgtctgttatatgcaacacagtgtgctataggtattggggacagcagtgaataaagcctaccctcagggactccacagtgagggaagaaggcatgaaacaaatgatcacttcattaagtaattacaacagagtttactgctatgtgggaagagacaaggtgctaagagaacttacgacagggacagaaactgggctgagatgagggaagattccctagggagtaagtagtactttaaacatgaaatccacaataaggatgttgatataagagagtgacagggtctggttgtagcatttatttatttatttgtttatttattcattcattaagcccttttaatgaggtatgattggcatacaaaaagctgcacatatttaatgtatcacaacttgatgagtttggaaacaagtatatacctgtgaaatcatcaccacaatttctgcaataaacatatccatcacctccaaaagtttcctcacatctttattatttttttccatgataagaacattttgcataagatctgcccttttaacaaatgtttaagtacccaaagaagtattaaccatagtcactatgttgtatagtcatctctagaacttatttatcttatattactgaaactttatacccttggatatcgccttatttcctcttcccctctggcaatcgccattctgctttctgcttctatgaatctattttagatttctcatatgagtgtgatcatgtagtatttgtccttagcataatggcccccaggttcatccatgttgccacaagtgataagattttcttcttttttaaggccaaatgatataccattgtgtgtatgccacatttttaaaatttattcatctatcagtggacatttaggctgcttccatgtcttggctattgtgaataatgctgcacggaacatgggagtgcagataggagatcctgatttcaattttttggatgtatacccagaagtgggattgctggatcatgcgatagttctatttttaatttttttgaaggaccttccattctgttttccatagtggctgcatcaatttacattcctactaacagtgtacaagggtttcaatttcttcacattatcaccaacatctgttatcttttgtttttggtaatagccatcataacaaccatgatgtgacatctctttatcattttgatttgcatttcgctaatgactagtgatttgagcaccatctcatatacttactggctactggctctgcgtatgtgtcttctttggagaaatgtctattcagatccgttgcctgttaaaaaaatcaggttacctttttttttgctattgatttgtgagtttcttatttttacatattttgaatattaactcttgatcaaatatgtggtttacaaataatttctctcattttttaggtccactcaacctctgttgattgttttgctgtgcaaagttttcagtttgatgtaacactgctggtcttttttttttctttgttgccagtgctttttatgtcatgtctaagaaatccttgttaataggattaacaagaataagtacttgggaataaacataactaaggaagggaaatatttttacactgaaaactataaaatgctgataaaagaaattaaatcagacacaaataaatgaaaagacatttaatattcattgactggaggaattaatattgttaaaatgtccatactacccagagtgatctatagattcaatgcagtccctagctaaatcccagtggcatttttcagataaaacaatcctaaaattcatttggagccacaaaagatcccaaatacccaaagcgattttgagcagaaacgacaaagatagaggcatcaaatgtgctgatttcaaactatattatgaggctacagcaatcaaagcagtatagcactagaatagaaacagacatatagaccaatggaacagaatatagagcccagaaataaatccacatgtatatggtcattggatcttcaacaaaggtgtgaagagtacacgagggggaaagaatactctctttgacaaatggtgttaggaaaattgcatatccacatccaaaaggatgaaatgggacccttatcttataccatcataccaaaatcaagtcaaaatggattaaagactaaaacataaaactggaaaccataaaactcctagaagaaaacatcggaaaaaaaagctctttcaaggtcttggaaatgattatcttggttgggacttttaaaaggtgtcattggcagctgtatggagaaagcgtttcagctttaaaaggtgtcattggcagctgtatggagaaagggttacagctgagtatgtggcagggagtcctataaatgtatggggtatggtctgaattagttttttcaaactattcttcatctcaatttattcacccaagttatgttccaaaaattctcattagaattctcctgactttttctttctcagcctgtcgaagacttggttttaaatattcatctgcttattcactcatccatatatatctaaaacaaatttattttagccataagcttatgaaaactagcttaaaattacatttctagttttcttaatatgatggaaaatgtatgtgtggcttcttaattttttgagtaaatgaggaaaaaagaaaaattatagtggtatgtagactatagaaagtttaataaaccattcatttttcttgaattcgataaaaatatttctcttcagaaatgacctttctcctcaaaaatgctagatgaactggagatcattgaatttaaatacagttttctcttagcaaatttctcagcagtttgtggcttttacaagaatttggagttaaaagaatcttaacttcctaacttataatgtattcttagtatcacttaaaaatagaaaacctcccaaattcttgtttcttcacacccaaaatttaagattctctatgatctttcatgacctgactccacattacttaagacttcaaattctttgaataaatctggctttctgttgcagattcaccagcggaggattctcaagcatgacaattttttttctttaactactgaggcccgaggttatatgttatgtctaaagctttttgaaatggtagtctaaagccttgttctcaagtgtggcccatggacgagcagcatcagcatcacttggaagtttgtgtaaaatgcagaatccagaatctcagtccccactccaaacctgctgaatttgaattctaacaagaaccaccccagatgattcctatacctctatcagtccccttctgatcatctctttcacttcttttcatactcctatatctgtacttagcaagcccaccagtgtctttttatccaatgtgctgcattggaaaccaatgtgtatttgaacgagactttgaaatgaagaacctatgtttctctctgtgtctgtgtacatcaattcatggtaagaatgttcattgttagttggtgccagcaatgctttcttctccccagatgtgctatgcgcatatgatcttcctcagtgttgagtactactttcatctcattatgctcttcaactatgccttcatattgtcacctctgattatccttcagtatctctgcctgctgtttctcattttccttaagctaacctttctttaactgtccattaaatggcattaaaaagagctgtctgtcctcagctgtcttctcactttacactgatacccctcttggcaatatcagccatttccattagtccattcatcattcatacgttcaacgaatatttatggagccctacactggtgctaggtgttctgctcggggattgatgtatagatgcatgggacagacagttccacttgagtgcatatgtgctacaatataaccagtgcgtgctctgggaacacaaaggagggacagcattgtgggggagtctggtgaggcatctggaggaaatcatcagattgcttcagatttgggctttttcccccctgaatgtttcacaggccctttatattcaataaagtgtaacaacaacaacaacaacaacaacaggcttctacaaatctatttttcattctctgttatctattgttttagtcaagattggctagactctgtcatgtaacaacagcaaatcccccaatactggtgatttacaaacaacaatagttaatttattacaatactacatgtcctttgcaagatggcagggggcctgtgctcatcgaggtccttcagggtccaaattgatgaactagccaccatcttgagcctttgtgatgattgtgtcagagctctgaaggctcttacatcagcaattaaatgcttctgcctagaagcaacactttttagttttgcttatagccttgaacttgaagcaaggcctcactcaagaggccagagaatgcaatgctcagcttatgccccagtagaaggagagagaactggaaatatttgatgaacaacactaacgatatgacaccaattcagttggggatatgtttgtttactacattattcaaaccagagacctcgaagggacctttctctcatgttcatatgattttgcatctttggagctttctcctaatgttccctttgtccatagggtttttgcgttggctaaggccttactcttttctcacttggagtattacaatagccttctaactaccctctaaacttttaaacgtcaccctgctgccaaagtgatcattctaatatgtttcaccctatttaagacctttctaaaattttctatcacaaggtaaattccaagccttgtacaagacctatcctgtctggtgtctcttcccttttcagtcttttctcttaccaggctcctgtgtactagccatgtttttaaattacttgctgctgggccttttcatatgtttttcccttggctttatctagaaaatgtttcacttcctcttgccacgccactctcctccccacaaatactttgcttaaacctagaaaatccctaatcatcttttaagattcacatttaggatactcgtctctaaacaggctttcctgactttttcaaatggaatgaggactatctctctactttttgctaccagattgtcctaggcatatcattctcaaagcacttgtaccatagtttatattaatattttttagattgcctgcccgtctccctcaactaatctataaacatcttgatagtaaggacctcttactaaatattgtgttctcagcagagtaagtatgaagttcttggcacatagaaaatgcaaagtaaatgtgtttcacatggctaaagatacaaagctaagaaattaattttaaaatcacattataggaagataaattctgcaagcacataatggttgacttttaaaacctgtatgttttgtccagaatgaaaagtgtgtgtatatgtatatgtctatttgccatgtcccaactcaaatcttgagcaagctaattcactctcataaacttcagtttccatctctctaaaactctgtcaaacgattaattatattatctgttttataggattattggaaggttaactcagttgatgcctatagtgagggaacttagcaaggtgcttgtattaattttttattgctcctgtaacaaattaccacaaacttggtagcttaaaaagatagtacaaatttattatcttagagttaagaagttcaaaataggtctcactgggcaaaatttaggtgttccttctgcagactctatgggacaatctattctcttgctttttctagcttctagggcttcctgcattccttggcttgtggctctttccatcttcaaaacaagcaatggtccattgagtttttctcacagttcatgaccctgacacatactctcttatctccctcttctgcttataaagacccttgtgattacattgggctcacctgaataatccaggatagtctcttcatctcaaaatttttacttcaatcacatctgcaacatcccttttaccacgtaaagtatgtaaagcagaatattcacaggttctaggaattgggatgtggcatctctgggggagcattattctgtctaccacagtgcccaatctcttcattacaaggaatcagtaaagtttgactattattattattagaattatatactatttcttaaatatcattacattttttttggctatagagctgaaacacttttgagccagactatcttaatacaatgtgactttctattaataatttagcacgaaaaagccatagttttctcactccaaatgtgggttaagtgattcacttctgaaagttagccattttgtgacactgggatccacttatagtaaaatgaaattgatatttatctaaaagtaccttagcagtcctaaagaagacaattttattgtcattaccatcaatgtgtagtaatgactaacagttacggagaacttagtgccaaaagccattcgaagtgtttatataggtattgactgatttgatcccaatgttgtaggactttctccttagttcacctaaaagctgggctcttgttacacagccatgaaagattaggctcacagacactttgaacggtgagaaaactggaatttatcgggctaaaaggggaaaaaaaagggaaacagggactctcagcaaaatgacagtcctgctagccagtttcctgcctcacaagttgagtcccaaataccaccccggaacaggagaggccaggctcctcacctctgcaaacggtgtgaacctcctgaggctccaccccagtgcacgctcctcccagtgcgcaggccagtcgggggttctgccggggagccatttttacttggctgtctcaccacagccagccccatgaagaggtattttatttttccttcctttatggcagttaagactttgtccaaagtttcagggcaagtggtagagatgggatttaaacctgtacttttaaccatagcacaataaacatagaaatgtagaaaagaatgaggcagtattagaagaataaatactctactttgggctaatatctcttagcagtattattattatttttttgagacggagtctcgctctgtctcccaggctggagtgcagtggcgcgatctcagctcactgcaacctccacctcccgggttcatgccattctcctgcctcagcctcccgagtagctgggactacaggcgcccgccaccacacccggctaattttttttgtatttttagtagagacggggtttcactgtgttagccaggacggtctctatttcctgacctcatgatgcgcctgcctcagcctcccaaagtgctgggattacaggcgtgagccaccgcgcccggcctcttagcatttttatagctcatcatgatacaggttgaaagcatttagttttattgagttctaattcttgtgcttaaaagaaaatgcatagtagacaaccgtgttgggagttggtcagcttccagagatacttgaaaacaagttgtccagtgagttcaggcttttaaagacatgtcctttaagtttattctgtttctcttcccccaaaatatactttaaaaacattaactacagtacctctcaaatattatctttctttttattctgccaaattgctttcaatacataaagcttaagagcaatgaagctgcctttttaaaagaaagttgttatccaagtcagtgttttcttaaaaatgtcaatgtttcagaggacttcttaggataaacagatgttatgaagactttatttttatttatttatttatttatttttgagacagaatttcactcttgttgccctggctggagtgcaatggtgcaaactcggctcactgcaacctctgcctgccgggttcaaacaattctcctgccacagcctccctagtagctgagattacaggtgcccgccaccatgcccagctaattttattttgtatttttagtagagacggggtttcacgcgggtcagggtggtctagaactcctgacctcaggtgatccacctgcctcggcctcccaaagtgctgggattacaggcatgagtctctgtgcccagccagatgttatgaacactttaaacactgtttggttaaaatgataaaggaaatattaaaatgacaaaggaaagattattaataaggctaattattaccaaaaagttaggaacaagtgttcaaatattttatatgagaaggaactaattttaagggaattactccagggtacaaccgtgaacaattggcatttgctaaaagtatgttgacagaactggatgcctactcatagattcagcaagataagtaaatcaacttaatgggcctatatattcattacaaccacattagcataaatatcaccttatggaaaaaatctctttatgccaaaaataagcaaggaagagagcaattaacaaatggatgtaaggaaaactataggtaattgattaattactaattattctgtatgtgtgaaatacatttcctatagtaattaaacctatcacatttattttgattaggataaagtctaaatcattttgaaaatcaataacaattaaatgaattccttcattttacctactgcatttgacttttactcatgatcacacagatggtttggagagcatgttacccgcattacatgatcatgatttagcttttatgcttcaatgttttatttacaatcttttggcagaggaaactgttgatctcagttagctagaaacagctgcttttctatttttatttgtagttaatgttttccaagtgtcaagcatatgtagagaaattgtttccatagactgatattaaacattttatttatgtttcttttatttttaatggtccttgggactatttagaaaagtgagagccaattagagcattcactgtaaatgcttttagaaaagaaaatctcccttggctctttctatcgatgggtcaatatcacattcatttattttcgtggcatgctcaagtacagtgcgatattctggaaacacaatctgctgtctattttgactgagttaaaaatacacgatctctttcaaagttttcaaatgtttcttcctaaagacaaagcaaggtggttttcaataatcttaggtttggttctttgttttgtcaatgaatggataccttgagaaagtggccagttgataatcttagtttaatgagtatggaaaaccaaacatcgtatgttctcactcataagtgggagctaagctatgaggatgcaaaggcataagaatgacacaatgaactttggggactcggggaaagtgtggaaagagagttggggtaaaagtctacaagttaggtgcagtgtatactgctcatggcatgtgccaaactttgcatggtgcatgggtgcaccaaaatctcacaaatcaccactaaggaacttactcgttaccaaacaccacctgttccccaataacctatggaaataaattttttaaatgagtatttcttatttcatataattacatttttattttctggtcgaagatgaagataatttagtttcttcttttagtttgtgctttagaggtttttttttttttggttcctatgatacaagttttgataaatgtatgagccctcttattttttatttgtgtgtgatgcatagtttactgaacattagtgcaaaatgtgggaaatataaagctgatggcaagcaccattgtgtcctttgatgacagatacagagagaggtagagcacatgtcctgggtcctgagtagcaaacaatgaccggtgagattaagaaactaaggaagtgaaagagaatgctgtaagattcaccacattttattgtgtggtgagtctcaggtgaggtagaattaccctacatttttgaagcaccaggaaaccttgataggagacccagtttctaaaccgtaagctcttgagaaagccatgtttcatcacagggctgtgtgatttgtggtagaagagaaactcttggttttgtggttgttgaccccaagaaggaggtcactattacggctttcatcttcgtctttgtgtttacctggttagaatgacatagggaaagtagctctagagttttcttaatgttttttaaaataaacacttctagtaatgtttcaaagataggttttttttgtgtttgtttttgtctttcaggaacattacaaaaggtctattttaaatcaaatgggagtgaacctttggtcactgatggtgaaatccaagggtccgatgttattcttacaaatacaatttataaccagagcactgtggtgtctactgcacatcccgaccaacacgttccagcctggactacggatgcttctctcccaggggaccaaagtcacaggaatacaagtaagtccaaaggtgatacatgctagaggcttttaatgtcccacaggtaggtttttaagtttggcaaccaatgcttttagttcacaatcacttgccggtcacacaggaaaatctccactcagtttcctggtaagcgtagctgagtgccctattttgtttgttgttgttgttgttgttgtttttcaggcggagttttgctcttgtcacccaggctgaagtgcagtggtgcaatctgacctcactgcaacctccgcctcccaggtttaagcaattctcctgcctcagcctcttgagtggctgggattacaggcgcccgccaccacgcccagctaatttttttttctgtagttttggtagagatggggtttcaccatattggccaggctggtctcgaactcctgacctcaagtgatccgcccgcctcggcctcccaaagtgccaggattacaggcgtgagccaccgcgccctgctgagtgccctattcttaaacatgaaatgccattagcccagatgttcaggtaggactgagtaagaaatgaaaacgtatcaatgccattcaatatttctgaggtctgaaaatttatgctgcttgccccagtatagtggcattgattttgtagtggttcatctgtgaaagtttgcgcttcagctttgaagtttttgaagttttaagttacttattttgagttaataagtaagttaagtcactgactttgtggttggtcccttgcaggaggaccaattcaataacaggatgctgagtgatttaatgggagctatccccctatttacctttttttttttttttttttttgagatggagtctctctgtctcctagtctggaatgcagtagcacaatctcagctcactgcaatctctgcctcctgggttcaagtgattctcctgcctcagccgcctgagtagctgggattacaggcatgcgccaccatgcctggctaatttttgtatttttagtagagacagggtttcaccatgttagtcaggctggtcttgaactcctaacctcatgatccacccgcctcggcctcccaaagtgctgggattacaggcatgagccactgcacccagccccctatttccttttgagacattcatgtgtccttttttcatcttgcttcccttttcacctgctattattggctgtaaaatttattttacatgttggtgaatgacaaaaaaaaaaatcacaccttgagaaaaatggcatgtgccaaactcttctgcatgagggcaaagggaaggatttgttagttattccagaagagctgggagagagaaaagacagaaagtgtggacatggggcgtggtgagttggtgagaggtgacagatgatatgctctggaatgtgactctaccttttgataaagttactgcccttccggaatacagaatactcggtgggagtggatttgtatggaaaatgccaagaagctttgggtgtgatacaaccaatgctaataaaaaataatcagagcacagtacagccactgccagaattttctccatagttgtcttggctcttcatttctactttctaaaacaaggttatgtgattgaaaattacacaaagcccatccaaccatgatcattttcttgtgtgtttctctctctttcatgaaaacccacaaagggatatcacatcttaagtctgagatggcgtatttatttttattttgagccaggaaaggaaggattaagttgacttttagctatcatagtatatgtttgccagtgtttgaggaaaagcaggattattctatttctccaacccaaaagagacagacagtttggattccactgtttcacagagcacctataggtattaactgtttgttgtgcatagtgtttaccagtgattcatatggatttgggttcattacctgacagtatttttgcaaaccagaattatgccaagttaaatttattttcctcatgggtttaattgtgaggttttatttttcagtcatgtcttaagcacttcattattcttaagaacagtgtttttcatagaagtacagaagtaatttaaacaaaaactcagtcaagttaatgtggttgcaattacagtaattgttattttcttctactaagtgcatttgtctttattttgaaagttccattatttgttaagattcaaacaggattgacaaatacatgtcctgaagagtaaagaaacatgtggctgttgttgctcagattggaagtttgatagaagtctgtctgactcatttgctcttcctatgattggaacattgcttgtgaatatgagcataaattgacatgtagaggaaatccaggtcaaattagaatggctaaatggagaaaggccaaaaccctagcatatgtgtcattttatattgttaatgtacttgacagttagcattagtctttcctgtctggccacatagactctcagtatactgttaatatcaactaaaattatttattgcaagaaattggatagctttccatacatttcagtaataatgcaagcctgtgattatagaacttttagagtttttagggaatgtttgaatattttctctgtgatccttataattaactgatgaaatacaccagacaggtagtagcataccccatttttcacggtgtgaatttgaggcttagagaaattagttgatgtatccagtatcacttgcctagtaattagtagacatgaaattttgattcagatcttaggactccaagatcagtgctctttcaagtttttcatcatcatttaatcttattgttttctttgccgtaacattattaaacaaattttaagttctgggagagaagaaagagtagattattttgttgttgtttttattgctgtatagtcaatgtgtaataaaatattagctgaatgaataaataaatgaactatagtcattttaaattttaatatatgatttatcacttttgctagaagtgcctgatcacacttctatgacttgatgtttatttcaccagttttacttaaaatatcatttaatgtcttagatctgtattaacactgagcagagagtttatttttatcctcctcttttattatgctcaaattaagatgttattttcaattcctggcatatgtaaaagctatttaaatatacttcagtccaaaaatacaatggccagacattcattctattctacccaaatatcctgggtaggaaaataccaagaaatagtctttccctaagacatttttcttgggggttcttcatgtcatgccaagacatagaatcctgcattttgtaaagctttaaccagaatacccccatattacactatgtagtacagttaggttttgtgaaagtgaaataagctttatgtgacatctggtacttctggagttaacattagttacattttgaaaacaaattataatgtgaaaaaggaaaaggcccatagttaatgttcatactatgtttcagcaaggactttttttaggttgtattctatatctgggtttttattttcaccattttttccttatgtattttataactatttaaatatatatttaactttaaggaaaggggaaacttttgccaaccaagatcttttgggtaaaagataatatggaacacaataaaataacctagtaactctgatgaggagttaaagtgacaagagagtaaattgatgtgctgaaagcttaaagtgttctgttctcttatcacatctttgataaccggatcctgaatcttctatttcagaccatcaccactatctaattttagaatattctcatcattgcaaaaaaaaaaggcatattccctgtcccttatttcccctttccctcagctcctggccaaaactaatctagtttcaatctctatggattttcttattctgaaacttttatataaaaagcaacagacaatatgtggtcctttgtatctgccttcttttattttgcatgatgttttcagaatgcatccgtgatatagcatgtgtcagtatttcatttctttttagtgctgagtaatattccttcatatggctctatcacattttctttatccagtcatccattgttggaaattaggattgcatatacattttttaaaactattatcaataatgcttctgtgaatattcacgtgcaagtttttgtgtgaaaacgtttctggttctcttgggtttatacctagaagtggaattgtgttatttctctgtttccttacttgtcttcagtctagttgttctatccattattgagagtggggtattcaagtctccaactattattgtagatttgtctgtttcttgtctttttttctttctttctttttttttttttttcttgagatggagtcttgctctgttgcccaggctggagtgcagtggcacgatctcagttcactgcaaccttcgcctcctgggttcaggcgattctcctgactcagtctcctgagtagctgggattacaagcacacgccactatgcctggctaatttttgtatttttagtagagacagggttttgccacgttggccaggctggtcttgaactcctgacctcaagtgatctgcccaccttggcctcccgaagtgctgagattacagtcatgagccactgcgcctggccttctttcagttctatcaattttttgcgtcagacattttgacggtctgtcattaggtgtgtaaatatttacaattgttgtatcttctttttatattgaaccttttattaatataaaatgtccttctttatttcttctaaccatttttgatttatttttctttttttgagatggagtcttgctctgttgcccaggctggagtgcagtggcatgatctcggctcactgcaacctctgccttccaggttcacgcgattctcctgcctcagcctcctgagtagctgggactacaggcgcatgccaccatgcctggctaatttttgtatttttactagagacacggtttcaccatgttggctaggatggtcttgatctcctgaccttggcctcccaaagtgctgggatcacaggagttagccactgcgcccagccaccgttgttgatttaaagcctattttgtggatactgattctcctcaacttattatggagttatatccttataaacccattgtaagttgaaactattgtaagtcaaaaatacatttaatacatcgaacctatagaacattgtagcttagcttagccttcaccttaaatgtgctcagaacatttacattagcctacagttggacaaaccatctaatacaaaccctattttataataacatattggacagctcgtgtattttattgtacaccttactgaaagtgaaaaacagaatggttatatgagtactcaaaatacagtttctattaaatgtgtgtcacttttgcacaattgtaaagttgaaaaattataaaagtcaaaccatcataagtgagtcatcccactctcttcttttggttattatttgcagggaatatttttatgtatcctttcacttacaacctatttgtgtctttgaatctaaagtgagtctgtggtagacagcatatagttggattatggtttttttaacccattctgccaatctctgtcttttgattgaaaaaatttaatccattaatatttaaagtaattactgatgaagacctacttctgtcattttgctatttgttttttatataccttgtagctttttttcatccctcatttcctggattactgccttcttttgtgtttagttttttttttaatattgaaacgtttaaattcctttttcatttcctttgtcatatatatatatataaaatctcaaaggatatatatatattcgatagctattttatttatggttaccattggcatcatatttaacatcttaaagttacagcactctaacttgaatttataccagtttaacttcaataacaaacaaaaactctgttcctttaactgctctgtcccacctctgaaactttcaaacattcaatagaatccagagttccaaaatagttatatcagacagattctgccagtgcaattgttgtctaggtggggagacagattgctggtgtttcctatcccaccatctttccagatgctctctagtaaaaaaaaattaactttgacagttttttttcccagtgttttcactgcttttgtggaggagtagatttttggaggatcttactttgctgttctgggattatttcctactcctcaattgtttttaccttatttattcactctgatttcttctttttcatttccttcaatatggggaattgatttttctcttttatataatgtatgaatgtgattatgatatatatgttatttgtaattgaagtttttatttcccatttttgcataaattccttcatttcttctcctttcctctgcctaagaagaacctaatagccaaatatgtatgattttatagttttctccatcctcttacaatcttatatgaacatatacacatacatgtacacaggataatattcacatagaggatttgggtcattgtttttattacttttttttttttacaaaatatctttcccatccaagaatacttcaagttagtatcttcaaggcaatagcttaattctaatctattgttataatgactaaatagtattccatgttgtcattataccataatttatttcaaccatttccccaataatgggaattcactttatatctagctttttccccctcagtgaactacatagtcttctttctgaagaaaaaatgatttggatgatgaccatgatgctgtctaaattgcagtgatttatttacattgataactagacatggaccgaaatgccctaaactcatacccaaaagttactgggtgtagaaagcttacgcaccaattcaaaacccttaggttgttctttcttcttagttttatgtttttaacatgagatgttttcattagctttaacatgagctctacaagaatatacagctggccaggcacggtggctcacacctgtaatcctagcactttgggaggccgaggcaggtggatcacctgaggtcaagagttcgggaccagcctgaccaacatggtgaaaccttgtctctactaaaaatacaaaaattatccaggcatggtggcaaacacatgtaatcccagctactcgggaggctgaggcaggagaatcacttgaacctgggggcggaggttgcagtgagccgagatcgcaccacttcactccagcctgggtgaaacagcaaaactccatctaaaaaagaaaaaaaaaaaagaaaaaaaaaagaatatgcagctaagaggatcagagcaggccttggagttttacctggattactactcatcaggcaactatcttagaggagagtttgagaaagggagtctaattagatatctgaaatctggtaaatctcttacccgttaaggatgttggccaggctggtctcaaactcctgaccttgagtgatccgcctgcctcagcctcccaaagtgctgggaatacaggcgtgagcctctgtgctcgacctataaccattattttataatagggatgagcataaataatatcttgaaatgtttgtaacaactctatattgatggaaatatctgatttctaattttttctatagttgttgcctacattggcaatttaattatactaaatttcagttgggtgttattggaaatggagatgttattttttccccatacaagttcatagacagcctaaattttatgtaggggccattggttctttggattctgattatgggcacctgctgtagaggaaaaaaatattttgttggtaccttggagggtctgaagtctgcctaagctgcttctcaaggtcttagtgatattccaaaagtcactgtagtcatgacctctagacgccattcccatgtgctctggtggacactagtgttagacccccattgttcaggtccagttggtttctctcctctatatattaaatcatatcctttattctgaaagaacaattatgagattcagacatgggcttctggctaacagcaacatctaagcaagaatgagtgcaacatttaagtaatcgttgcatgcttgtttggttgtcagcattctagtaaagacttgcacaattctagagagagaaaagtagctcgaatataagaatggattctcttcttctcttttccctgatttccttcccttcctcctcattccatctttagatgattctttccctaggatgtattgggttcctcccagaaagagcaaactcagtcatctgcagaactaggcttctgaaagcagtaatggaacagtgactgtttcactctcctttgggtacagtcctagatttcctttttcaaagatgtcttggcaagactcctgaccctctctcctaaatgaatcctgcaatatcccccaggtgacaaatgcccccaaaacttatatgtttatgccatattaatacatacagcaagtgagagtcaaacagtcacatcaaaagggcttgtggctcaaattttttctctccagcttcattatcacaatttcctctttaggaagaacagcctaataatacctttgattcacagagagaaaaaaaggaaaacaagcaaaacagtagcatgttaacagcattgtaaaaataatactggtcaaaatgatcttttaaaagtcaaaggctcagatgaaagtcaaaacaaaaatcaaaaaaccaaaaaaacccaaactatgtaatttactttttcctctggttctgaaagaaaattggcactgtatgtaatcttttgcctgaattattcaatttgttgactgtctcaggttttaagtatttgtataattttgtgttgagagcaaaaaacccatcagtgggaatctgtttgctgttacttgtgcctttggaaaatatgccttttcacttgtagctgaaatgagtaaggtaatgagttttccaaaccaaaagctttacatcttttcaatttgacgcaatccacttcttgtgtttcagtgttaacacattttattctctattttgctgctccagatcattaatctaatattcacatgtggtgtttgaatttctgtttttgagacggagtcttgctctgtcacccaggctggagtgcaatggcgcgatcttggcacactgcaacctccacctcctgagttcaagtgattctcctgcctcagcctcccgagtagctgggataacaggtgtgtgccaccacgcttagctaatttttgtatttttagtagagatggggtttcaccatattggctaggctggtcttgaactcctgacgtcttgatctgcctgcctcggcctcccaaagtgctgggattacagacgtgagccaccgcgcctggccagtgtttgaattaataagacttatggtatagtacttgtttgtaattatattaagctgtgtaaacccattctcatgcctgtgtacttttctaaattgtatgagatgtctcaaattttggagaatctaggttaatattctgtgaagcaccatttgttaatcagtagctatttattggatgtcatactccaggttttggctctatggactataaagatggataagacagaagtcctgtccccaagcagccagttgtctactaactgccttgcaacatgaacatattcttacaacttgagaaataaagtgagaaattctataagacaggctcagaaacaaacatgatcgatttcaattctttttatttttctaaaatataatattgctaattcataccattttaattctataataaatacaactttttttgtaaagttttctttacaaggacaaaaatatattttaatttaaaggtctatcctggagcttctatttttaaacagattaaactgcttcattttaaaatttaataattatcttgaatcaattgaacagagactttagttttcaattttgtctgtagagtatgggaaggccaacattgctgttgcaggtattaatgggaatgttatcacctcaggaagtgggagatataaaattttgtaattttctcattggaatggcctccaaattcctccattgtgttttaagtactcaagctcagagagtctgttttgttgtggctatgtgtttatagatatgcactcaatataatcctctagaatgtgcatttcaggagactgatttatgatgtcctgatggctgttaagccacagtaactatgttaccatataatatgtcctttaaagttaatgagaaatttttttaaatgaataatatgggaggttgctgtgggaaagaaatggagacctggttgggtgtggtggctcataccacacgcagcaacttgagcctgggaggctgaagttcaagtgagccgagatctcaccattgcactccagtctgggcaacagagtgagaccttgactcaaaaaaaccccccaaaatcctagcactttgggaggctgaggtgggtggattgcttgaattcaggagtttgagaccagcctgggcaacatggcaaaactatctctacaaaaaatacaaatagctgggcatggtgaggagtgcctgtagtcccagctactcgggaggctgaggtgggagaagcacttgagcctgggaggttgaagttgaagtgagccgagatcttgccattgcactccagcctgggcaacagagtgaaaccttgactcaaaaaaacccccagctacttgggaggctgagatgggagaagcacttgagcctgggaggttgaagttgaagcgagctgagatctcgccattgcactccagcctgggcaacagagtgaaaccttgactcaaaaaaaccccaaaaaacaaaagacaaagccccaaatccatagaaatggaaaccttaaatctaaagttttttcctagagtttctctagcttattctagagtttgggtactggccagtcatatcacagccaatcatgagaagcagtgaagcagaaaatgcctggggacacatcaaacgctgtcaacctcccagtagagttggccctacaggtgccaactttctccctcttcagctgagcttctgtgtcttccctccatccaccctcagcaccttccctctgaagatctgtttaaagcatgccagtcattaagaaaatgtggcatatatacaccatggaacactatgcagccataaaaaaggatgagttcatgactttgtagggacatggatgaagctggaaaccattattctcagcaaactatcgcaaggacagaaaaccaaacaccccatgttctcactcataggtgggaattgaacaatgagaacacttggacacaggatggggaacatcacacacgggggcccgtcgtggggtgggaggaggggggagagatagcattaggagatatacctaatgtaaatgaagaattaatgggtgcagcacaccaacatggcacatgtatacataggtaaaaaacctgtacgttgtgcacatgtaccctagaacttaaagtatatatgaaaaaaaaagaaagataataaatgagacaattattaaaaaaacaacaacaaaaaagcatgccagtcatctcagtccctccaggggagctgttccacttgtatgcgtctagtcagccatcttgtcctatctctaatttctttattgttaaaaagaaaacatgaaatctaacttcttaacaaagttttgagtatacattacacttgttaatgtgcccattcatcttgcacgcctgaaactctatacccattggttagcaactcctcatttccccttctgcccaacctctggcaaccatcattccgcttttctgcttctatgagtttgactatgtttgatactttaggtaagtggaatcatgcagtatttgcccttttgtgactggcttattttacttagcataatgtcctcaagtttcatgcataccatatcatatggcaggatttccttctttgttgaggttgctgctgcttttatagaagaagccactgcaagacttgtcaatggggctagtcttacagtctggcacatgataagaactcagaaaatactagccagaaaggtcaggaagagtctacttgctcccttttcctctttgctttgacccatgtactacaatttccctttcgtgctgactcccacatccctcaccaaaaacaagccagacttatggcggagaagatggtcatatttttaagtttattttaaaagctcttttaaaaataataattttattatttatcagaattatatatctactatttaatttaagcaatatagaaaactggaagcataaagcaagaaggaaaaaatcataccaaattcccctacccagaaagaaaccatgtttaataatatgaactaaacatactttcacacccgggagtgcagggctcctgccctgccagctgagaagggggtggggctcccacctgttcccggctcccaccgacttcggccagtggagcatgcagccctggccatgcctcccgcactgcagctggcatcttctcagcatctccagatgggccaccgctgccatcataatcagtagttttaaaactacctataaaaatcattcttacttttaaaaatttattttaaaatcccagataattttatagacaagttttatcacacttttaaggaacaattaatcaccattaaatgcaaaatattctagagaaaatagaaaatgccgataggtagttttgaatcaagtagaaactagatatttaaagcaaagacaatatgaaaatgaaaattatagatcaatcttatggacagaatgtttgtctccccaaaaggtatataataaatataccttttatcttttagtaattaataataaatataaaagataaatataccttttatctttcaaatcaatgaacctggttttaataaatatatatacctaggtatacatttatatactaaatatacctagaaggtatatttattagaatataaaaggtatatttattaaaagaaagaaatgacatgttttatgtgtattttaaggagactagaagttcattttaaatgtttccttttgagtatgtagaacatgcctttccttacgatcttattctccataaaatcttcctttgcagagtcagagagtaaaaaggtaaacaattgctcaacttgattctgacttatgatagattttaagtttagaggattctgaattagagagcgttatttaaatgagccttttacaaatacattaaggaccacaatacccagctggtgtaatccaggctttggtatgcagacctgccctgttagtcctagaattcattactcccgtactcaaatcttaactattactaaatgagattcccaataaactacatagggctgaaagtctactgagatctcatcaccttcatgagtggtgaaatttaaaacaaactactagtgaggtagtggattttacaataaatcctttccttattgaacatgttgctccagtaagtaattttttatactctcatcattatagaatttatttttaccactgttggcatgaaaaacaaataatttctatatgtgttaaattttggctaaatatgtgaaatgtggtctaattccaaattctttttttaaaaacattctatagcactaagtgcctttgtatagtagagactcaatacgtatttttaaatgactaatgttttaaaatgcttacttttttaaaaaaaaattataactcccagcattgttttattgtacaagtaagcaaaactaagtagttcaattttgaattttgttcctatataaatgaataattattccctttataaatggatacattatagaatccagaagaaaaaagcagaatgaaagctttctgcctcaattttcttacctatgtaacatggatacaaatctctcccctgtctagttcacagagtttttgtgagtcacaaatgagataataataatagcaaaaacttcttatcacatactatgtgctggacattgtgtaagcattgttttatccttataataaacctattacacagttattattatttccattttacagatgaggaaactgataaacagaggagttcaataacttgccaaaggccacagaaatataaaatagtagccaggattttgaatcagactgtggaaccaccatattatgtatagaaaactgtttaacaaacttgaagacactatatacattttaattattgttatcattcattcataactctaggatggatgattttatggggcaaggtgtagttctttcaaaatttataaaaaatgcctgacagatgctgctacagctgcaatgttaagtctcacttaattctatggaatgtgaataattgatttacaaagaaatccgctaccttcacgccaatggcgcctcaatattcttcatctgcctcttcctacacatcggccgaggcctatattacggctcatttctctaccttgacccctcactgtgttaaagcattgtcacagtaagtagtttcttgaatgaatgaattgcaacaggttatgagcctttacttatgatttaaacatcttaaaaccaagtatgaaggtgcgtttaggaataagatagagacaattatctatctacctatctatctatctatctatctatctatctatctatctatgtaatgtgaaagcttgaagcttggcaaaatacatcaccaagagaatcggggtgcattaaaaagcgtttagtctagaatatatacaattatatagaaaataaactcccaaacctcgtatttctcttgacaagaatagctagcttttacttaactctgataatttacgtggcattgcacaaaatacttacatatttttgtataacttagcaagacattggcttaactgtgccttcactatgtctgtaaagactttttacaaatgttgtaaatcactcattaagaaaatgcatcttttgtttcctgattttctcttatgagaagtagaatagttactgtgtttaggtttggtttacagttagttaagacctgaatagaaaaccaaataccacatgttttcacttataagtgggagctaaatgatgagaacacatggacacatagagggaaacaattcacactggggtctatcagagggtggagggtgggaggagggaaagaatcaggaaaaataactaatgggtactaggcttaatacttgggtgacgaaataatctgtatgacagccccccatgacacaagtttatctatgtaatatacctgcacatgtacccctgaacttaaaataaaagttaaaaacgaaagcttaaatcttcatggagagaccctgtcttcagttttatgttttctcttagcttactgtaaccctcttacagatcttcctaagtacacgatatcctttcaaattgatttttcccagaaatcattctggcaaaatgtttcttcttaggtgaattatctagaatagagaatgaccttcattattccactctgctgatgtagtcctgacctgagttgacttcctggtacagccaggaacaggcaccaaaaatttccagtctagttggtccctctgtgagggctcataacccattttttcccaatgcaaaatgctgcctttatttacatgaaatatgaaaaaagttgttgtaacatcacttggatctgtttttattttttaacctcaaataattttggggggtgagtatacttaaaatctactttcttagcaattttcaaagtgtacagggcattattattaactatagtcaccatgctgtacaataggtcgcttgatcttacttctcctgtctaactgaaattttggatcctttgaccaacatattgcaatcctcacccttatacccctagtccctggtagccatcattttactctctgcttctatgagttcaactttttaagattccacatataagtgaaatcatgtggtttttgtctttttgtgcttagttgatttcacttaacataatgttctctaggttcatccatcttgtcataaatgacaagatttccttctttttaaaggccaaatcatatttcattgtgtgtatatactacatgttctttatccattcatccattgatggacatttttattgagtccatatcttcgctattgtgaataatgctgcagtgaacatgggagtgtagatttctcttcaaaacactgattttacatccttggaatatacagctagtattggggttgttggatcgttttgtaattctatttttaatttttgggaggaatgtccatactgtcttccataatggctacactaatttacaaccctatcaacagtgtgcaaatgctcccttttctccacatcctcaccagcacttgttattttctgttttttcattttttaatttttgttttagtaatagccatcctaacaggtatgaggtaatagctcattatggttttaatttgcatttctctgatggctagagatgttgaactttttttcatatacctgttggccattcgtatgtatttttttgtgaaatgtctatttagggccttttcccacttttaaatttagttattgtttcctaactactaaataaaattccttttgtattttggatattaaccccttatcaggtgtatggtttgcaaatattttctcccattttgtaagttatttctttgctgtgctgactgtttcctgggaagaagctttttagtttgatgtaatcccatttgtgtatttatacttttgttgcccttgcctttgggatcatattcaaaaaattattaaccagaccaatgtcactgagctttccccctatgtattcttctagtagtgttatagttttaggttttacatgtaagtttttaattcattttgagttaattttgtatatggtgtaaaataagactaatctcattcttctaaatctttatatccagttttttcaacactatttattgaagagactgttgtttccccattgtgtattcttggcatctttgttgaaaatcaattggtcatcaatgtgtggatttatttctggattcttcattcagttacattggttttatgcttataccccaatatcatgcttttttgattactatagctttatagtgtatttggaaatcaagtagtgtgaaaccttcagttttcttttcgctcaatttttttttggttctttgttttttgtgtgtttccatatgaattctaggattttttgtatttctttgaaaaatgttattagaattataatagggattgcactgaatctgtagatcactttgggtagtatgaatattttaatgagattaatccttccaaaccatgaatacaggatatttttctatttatttgtgtttcctttcacttctttcatcaatgcttcatcattttcagtgtaagatctttcacctccttggttaaatttattcctaagtattttttttgtagctattgtaaatgtgattgttttctcgatttcttttttgtacagtttgttgttaatgtataaaagcagaactggtttatttttatttttaatttaagtttatttttctctccatttctgattgaaacaactgattttttatgttgattttgaacatactacttttactacttttctgaatgtgcttattctaacaggtttccttgtggaatctttaggtttttctaaatataagatcatgttgttacaaacagagaccgtttaacttctttctttctgatttgattgccttttatttctttctcttgcctaattgctctggttaggacttccagtgctatgttgattattagtggcaagagcaggcatccttgttctcttcctgatcttagaggatggcttttctcttttcccattgcatatgttgttagctgtgggtttgtcgtagatggcctttattgtgttgaagtacatttcttctatacctaatttgttgaaggtcttatcatgaaaggatgtttaattttctcaagtgttttttctgtcttttgagatggtcgtatggcttttgtctttcattctattaaggtgatgtatcacatttattaatttgtgtatgttgaaacatccttgcatcccaggtataaattccacttgatcatggtaaatgatctttttaatgtgctgttgaatttggtttgccagcattttgttgaggatttttgtatctatattcatcaaagttattaaggtgtaattttcttctcttgtagtgtccttgtctggctttggtatcagggcaatgctggctttgtaaaatgtgtttacaaatgttcacttttcttcagttttttggaagagtttgagaggaattgatattagttctttaaatgttttgtggaattaatagtgaagacgtcaggtcctgggcttttctgtgatggaagactttttgttactggttctttcacttgagtccgtgagaagagaccaccgaacaggctttgtgtgagcaacaaggctgtttccttcacctgggtgcaggcgggctgagtccgaaaagagagttagcgaagggagacaggggtggggccgttttataagatttgggtggatagtggaaaattacagtcaaaggggttgttctccagagggcagggatgggggtcacaaggtgctcagtgggggagcttttgagccggggtgagccaggagaaggaatttcaaaggtaatgtcatcagttaaggcaagaacaggccattttcacttcttttgtgattcttcagttacttcaggccatctggatgtatacttgcaggtcacaggggatatgatggcttagcttgggctcagaggcctgacaggttcaatatcctttctcattattgggctgttcagattttctgatttttcatgagtcagtcttgttaagttgtatgtgcccaggaatttatccatttcttctaggttatctaatttgttggtgtataattatttatagtaatctcttatgatcctttgcatttatgtggtgtcgattgtaaggttttctcttctgagttttctttttcttagcatcctattctcatttatggatgcaatacctatttaaatctatatatcttggctcataggagacagtcatggtttatatttattttcctggcatagctattaatagctcattgttatcattctttaaattttctcaggtaggatgataaattacatgggcactttactctgaagttattgatgatttttttaaagttctcttctgtcttgaactatttctattttttcagagcgacattttcagttattgttaaccttatctgtggtaccaatagccataccagctttctcagttttcagaccattgtgtaatttctttagagatagatgaatatttttctttttttttctttttaatggtggtaattttgtggctgtcttgtattctgtgcgtgtgggtggagtgaggagcaattgtttcatatacagatctttaatatctcccttttttagttccagtttttgttcttctctgccttatctgacaactcaagcccagaacctctcctaggttctgctgggcagattgacttcatcctcttccacaaacttcaaaatttcttgcatgctctttttggctggcagaaatttgctaaaaatatttatcttctgatggaagcccctctccatgctctttgctgttatgagtttatgcctttttcccctttactattctttttttggtgaaatgtcaggagggaggatatgtgcttaatcaaacatcttgaataggaaaatagttgtacctttttttttttttttttttgagacagagtcttgctcttttgctcagactggagtgcagtgacatgatctcagctcactgccaacctccgcctcccgagtttaagcaattcttctgcctcagcctcccgagtagctgggattacaggcgcccaccatcacacccggctaatttttgtatttttactagagatggggtttcaccatgttggccagggtggtctcgaactcctgacctcaggtgatccgcccacctcagcctcccaaagtgctgggattacaggtgtgagccactgcgcccggcctttgttttcttttataatgagtataatgatgccttctctatttgtttttctggcaaaggtttctggttgaacaccagtattcattctccttcgtttgtagttgatcccactccccatttttatctgggcacatgtcaaactggaataatcctagcctctcatgcaactagatgtggccatgtgacgacattctggataatgggatatatgtggaagggtcttgtagcagctgaaactgttcttaagaaatagtaagagtgtgtgtctttgtcctctttactacttctccacccttctgtctggactgtagatttcactatcttgggccatgaagttagggctacataaagagcctatgtttctggcaccacgggatccaattcctgtcctagaccactcatctagacttttatggggcagagaaattttgttctgcttaaagcaatgttatattccattttccttcactacagccaaaccaaacctaactaatacaaccttaaaagataagggtagaagtggttcgtaaactacaaaggggtactgaaatgtcagatattatcataccttactccagattcgattttgagctctgcctctgaaccggctacttttcaaagaaagccccctttaaatatttcaacggctggattaaagtagaataaaatatattcatctgttaaatgattatatagttgttagttctttaaaatgatttcaaaaccacaaaactatagaaaaagtgttagaatattttcagtacattaatctccctaataaggagtttgtaaaagtagaaaaaacacccctaaaagtcagtaggaaaaatcttccaagcatatgaaactgaagacaaaatgcaaatggtccttaaatatatgaaaaggtgctcaacttcactggcaacaagttaaatgcaaatgaaaaatcaccctacaatataatttctcacctatcagattagcaaaaatccaaaagtttgacactgttctctgttggtgagactgagaaagcagacatcctcatacattgttggcgagaattcaaaatggtacttctcgatgatgggggaatttgacaatagctaccaaaattctgaaagcatttatccgtttacccagcaatcctacttctgggaatctattgtacatctcaggcatatgtacaggttacttattacagcaatataatagcaaaaagttgaaaacagtccaaatatttattaaagggagattgcttaaataaatcccagtacaacatatagtggaatgttatgcagcagtaaaggaaacagtgaagctctccaaatgctaatatgggaaaattcctaggattctttttttttttttttgggggacggagtctcgctctgtcgcccaggctggggtgcagtggcgcgatctcagctcactacaagctccgcctcccgggttcacaccattctcctgcctcagcctcccgccaccacgccccccacaacgcccgccaccacgcccggctaattttttgtatttttagtagagatggggtttcaccgtgttaaccaggatggtctcagtctcctgacctcgtgatctgcctgcctcggcctcccaaagtgctgggattacaggagtgagccaccgcacccggcccctaggatgttttctatcttgcatttttaaaatgatctcttaatattcagtggtttctttggctgggtggagggaatgagccttttagtattctaattgcttcaaatatgggcttccatcaaaagcataagcccaaaagctgataacccctaaataaaataatgtaattaaaactgataaaaaggtgtggtcaaaatatacaggtgtattacatattactatacatacagaccttgagatatgtcattatatgctttttagcctcttcctttcatgagccattaagaattatctcaagaactatttttaacataaccctctacattagctctaagtaatggaaattactcagaagacataggtttcagatctgaaatttctacataatggctatgcacctctaggcaaatttcttagccttctaaaaattgagttttctcatgtataatatagatatgatttcatgtaactgggtcttgaaactgaggcgattgtgaataagagaatcttgtttaagcagcaacaataaaagcaatgaatctttatacagacaagagaataaggaataaaaaagaaaatgtggtcgattcctaaaatcccatcatatgaatgcatgtcaacatttttgtttatatcgggtcaaccaggcaaatttctggcatgaaggcaatggaaaagccatggatatggtggcgcccaaaagagccaactatgggagaagataatgtcagaggctctgagctgctcctgaactgttgacataggcgggattacaaatctttgcataattgtgtgttttaaaaacaagatcattgtatacaaattgttttgtgacttcctacttttacttattatattatgagcatcatccgttgtgattaaatagtcttctgaagcatctttcatgtacctaaattaaatattctattgtttgttccatattctaaagaacaattctttttgctgaatatttagatgatttctatcttttaaaaattgtaaactatgcaaagatcaagatccccgtagataaatccacattcacaaatatgattatttccttaggataagtttctagaaatgacttgataatgtcaaagaatatgcatggtgaaaagatttttttggatacatattgccctgcccagctgtgatccaaaagaaaaggtgattgccagtttatatgcctactagatatgtatgaggagtatgtattttccacacattttcccaggacacgaatgcttttcctctgtaaatatttgtagcttgatttcattatcatacacatacacatacttacatgcacctatgtgtatgattgcatatctaaattttttcttgtgataagtatactttatcttataaacaaatattaaatgagtttgcaaacatatacttctgatgtgtccactcttaaatgtgcatgtctttacttcccaggtgcctgtatgaacatcacccacagccagtgtcagatgctgccctaccacgccacgctgacacctctcctctcagttgtcagaaacatggaaatggaaaagttcctcaagtttttcacatatctccatcgcctcagttgctatcaacatatcatgctgtttggctgtaccctcgccttccctgagtgcatcattgatggcgatgacaggtatttcggaacccagattattcagtgataagagttggttatagcagaagtgtcctaggagaaaaaaaattatccaaatgactcccttttattttggttgttattagccacattagtcatggctagttctaattctttgaaaatagaaatgttttgaaaatctggaataattttatttatgggaaaaaattattcacaatgttagattgatgctatcagaggaattccataatagctgttctagtgaggatccagcataagacagacaacacactcaaaggggtgataagagagtttcttgaagagactatttatggagctgtgggcagggttaagagaacaaataagtgatgggaggcaccagggtctcatgatacggggatacagttccaccacccaagattgaaggggaataatggccagtagcacctagagagagttagagagagttgtatctatgggtaaagggtcttggacaggccaggtgctatgaccctaggcagaggagcacggccactgccaacccttcagtcttgcagtgagagagaaggaaggataaataccctgacctcactcacctcccaccctcccatctgccagtgcctctcatcaaatgaactcatccacaaccagaggacaagggtgcataattcatgtgagcatggtggatgagatccagaatctcaactaaatctcatcagttcaaaagtcccaaatcttatactttaaagcaagtgtgaaccatacatagatgttgggtggttcttccactcaacactgggaggcagagcagggcaagaaggccaaagtgtagacacagagagatagacagaggctatccagcacaatatcaaacaggatcagggataatttcaataagtacatcaatcaaaagtatatcatggaatttttgaaatattaagtatacacttaaaaaaatttcaaagcatgtattacttattcacatataacatcaattattttctgaattaaaatgttacaaagttttagaatagtaatacaagaataagttgcattttttctgtgtgtttgaattcctatttatgttaaattggcagataaaattgcatgcatttactgtgtcaacatgatgttttgaagtatacatacatgatggaatggctaaatctagctgattaacaaatacatcacatcacattgtaccatttttgtggtgagaacactttacatccatcattttagcattttttaagaatactacacatacacatatacatacaaatatacacatatgtgtgtacatatatatacagacacatacatatatgtatgtgtgcatatatgtgtgtatacatgtgtatatatacattaatatgtgtatatatatgtgtgtatatatgtatatatttgtgtgtatatatatacacacttagagatggggtgtcgctatattgtccaggctggcctcaagctcctaggctcaagcagtcctcctgcttcagcccctcagctagctgggagtactgtaggcacacaccaccatgaccagctaagaatacaatatgttatcaataactgtagtcaccatgctatacaaaagatctctttaacttattccccctagctaactgtaattttgtgtcatttgaccaacatttccccaatcttcacccttgaacttccccagtctcttttcacctttattctattctctatttcaatgagatcaaattttaaatactctatatatgaatgagatcctgtggtatttgtctttctgtgcctgacttacgccacttaacgaagtgtcctccaggttgatccatgttgtggcaaataacaggatttttttcttttttatggctgaatagtattccattgtgtatatgtgtgtgtgtgtgtgtgtgtgtgtgtgtatcacattttctttatgcattcattggttagtggatacttaggttgattccatatattgactattgttccattgtctctctccctcgcctggggccttcctattctgcgagacacagtaatattcaaattaggctaattaacaaccctacaatggcctctaagtattcaggtgaagggaagagtggcatatctctcactttaaatgaaaagctagagatgattaagtttagtgaggaaggcgtgttgaaagccaagatatgctgaaagctaggcctcttgcacccaacagttagccaattgtgaatgcaaagcaaaagttcttataggcaacaaacagtgctacatccgtgaacacacaaatgattagaaggcaaaacagccttattgctgatatggagaaagtttttgtggtctggatggaagatcaaaacagccacaacattctcttaagccaaagcctaatctagagcaagattgtaactcttcaattttgtgaaggctggaagaggtgaggaagctggagaagaaaagtttgatgctagcagagattggttcatgagatttaaggaaagaaaccatctccatgacataaatgtgcaagatgacgtaacaagtgctcatttagaagctgcagcaagtcatctagaagatttagctaagatcattgataaagatggctacactaaacagcagattttcagtttaggcaaaacagctttgtactggaagaagatgccatctaggactttgctagctagagaagagaagtcagtgcctggctttaaaacttcaaaggacagactgactctgttgttaaggtctaattcagctgatgactgtaagttgaagccaatgatcttttaccattcccaaaatcctaaggccgttaacaagtatgctaaatctactctactcatactctataagtgtaacagaaaagcctggatgacagcacacctgtttactgatagaccaatggaatggaatcgagatccaataaataaatccatgcctttacatcaaactggtttttgacaaaagcaccaagaacactcaatggagaaaggacagtcatttcatgcaatggagaaaagacagtcaataaatggcattagagaaactgcttactgattattttgaagcccatttttgacacctactgctcagaaaaaaacagatttcttttaaaatattactactcactgacaatgcacctggtcacccaagagctctacggagatgtaagaggagatgaatgttgttttcttgcctgttaacaaaatatctattctgcagcccattaatcagggaataattttgactttcaagtcttattatttcagaaatacatttcataaggctgtagctgctatagatagattgtgatttctctaatggatctgggcaaagaaaattgaaaacctttaggaaatgatttaccattctagattccattaagaatgcttgtgattcatgacaggaggtgaaaacattaacattaacaggaatttggaagaacttgattccaacactcgtggatgactttgagaagttcaagactttagtggagaaagtaattgcagaggttgtgaaaatagcaagagaactataattaaaagtggagcctaaagatgtgactgaattgctacaatctcatgatcaaacttgaatggatgaggagtagcttttttatggatgaacaaagaaagtggtttcttgagatgaagtctattcctggtgaagctgctgtgaacattgctgaaatgacaacaaaagattttgaatattaccttaacttatttgataaagcagtggtgggatttgaggttttgatttgcattgccctgataattagtgatgtttaacattttttcatatacctgttggccatttatatgtcttcttttgagaaatgtctattcaggtttttttgatcattttgtcatcaggtgatttgttttcttgctactgaggtgtttgagttccttatgtattttggatattaaccctttattagatgtatagcttgcaaatattttctcccattccataggttgtctcttcactctgttatttcctttgctgtgcagaagcttttagtttgatgaaatctcatttgtctacttttgcttttgatgtttgagcttttgggatcatttcccaaaaatcattaaccaggctataggttccccctatgttttcttttagtagtttcatagtttgggcccttacatttaagtctttaacccattttgagttcatttttgcatatcctatgcgataagagtctaatttcattcttctgcatgttgataggcagtttccctaatgccatttattgagtgtcttttctccattgcatgaaatgactgtcttttctccattgtgtgttcttggcaccttgtcaaaaaccagtttactgtaaaggcatggatttatttattggatcttggttccattccattggtctatgtgactgtttttataccaataccatactgtttcagttactatgtgttattattccagtctcacactgctataaaggactgcatgagactgggtaatttacaaacgaaggagatttaattgactcacagttctgcatggctgggaagacctcaggaaacttataatggtggaaagggaagcaaacacatccttcttcacatgatggcaggaaggagaagtgcggagcaaaatggggaaagccccttataaaaccatcagatctcatgagaactcactcactatcacaagaacagcaacatgggggtaactgcccctatgattcaattaccttccactgagtacttcctatgacaaatgaggattatggaaactacaatttaagatgagatttgggtggggacacagctaaaccatatcattatgctttgtagtatattttgaagttaggtagtgtgatgcctccagctttgtttttttaataggcttggtttggctgttttgtcttttgtgtttccatgcaaacttggggattattttttctgtttctgtgaaaaatgtcattggtattttgataggaattgcattgactctagatcactttgggtagtacggacacattgaaaatatgaattcttccaaccatgaacatccatttctttccacttatttgtgccttcttcaatttttttcaatgtttatagttatttgtgtagagatctttcacttccttgtttattccaaagtgttttttgtagctattgtaagcaggattgggtttttaaaatatatttttcaggctgggcgtggtggctcacacctgtaatcccagcactttgggaggccaggcgagcagatcacgaggtcaggagattgagaccattctggctaacatggtgaaaccccgtctctactaaaaatacaaaaaaattagccaggcatagtggcaggcgcctgtagtcccagctactcgggaggctgaggcaggaggatggcatgaatccgggaggtggagcttgcagtgagctgagatcgtgccactgcacttcagcctggacgatggagtgagactctgtctcaaatatatatatgtgtatatttgtgtatatatatatatatatatatatatatacatatatatatgtatatatatgtgtaaactcatttcaatcattctcctgattataattcaatctctacttgaatgttagctgtaaatttttagttaagctgcttacagttttcagggcacttttaggtacaatttccttttcccctgacctgataagtgtgctaatatggtaattttttacttctattttcatggataatgatatccattattatattagttttcaagtatcctttggggccttattttattttttattgtggcatttattattattattttttgaggcagggtctcgctctgctgctaaggctggagtgtagtagtgtgatctcggctcactgcaacctctgcctcttaggttcaagcaattctccctgcttcagcctcctgagtagctgggattacaggcgcccaccaccgcgcctggctaatttttgtatttttagtggagatggggtttcaccatattggccaggctggtctcgaacttctgacctcaagtgatccacccacctcagcctcccaaagtactgggattacaggtgtgagccaccactcctggccctgcatttattattatatttaattttataattgcactttcagaccaatgcttcttgctgtcacttagtgtatgtgtgggatctgcaagctaaatttaataagcaaagtgagttcagagaagtaaaatgtattataaaaaaaaattctaaagtcaaatatatttttcttttatatttcattattttggatcattcatcatactaatttcccctgctaaccaaataatgaagatttgcttgtatttcatcctagagacaatacctacataatactatttaaaacttaatttaaaaatattataatggtatgtgtaaatgttatagtttttaacttgattcctttgagacctcagatcctgatcaactatatcatatgttataacaatgagctttcacagtttctcttttagactgtgtctgcttttaataaatgtacacatcatgtactgcaaaacaggctaattgaaatggaggagacccagcagattatctccagcttgcttatatgttccagtacattgcagagatattccatgctcctgaagtgagattttaactttaagaatttgatgtgttggttatttgtttttccctctgacatattgatttgccattaggtcctaaacaactattcttaatatctagagcaattttataaaaaaaattacttagccacatgactaagattaaaaattacacctgaagcatggaaactacatgttttctgtcatgtactcaattttccatagtatactacagttttctttagtgtacttaatccttgtaggtttgcagtgagaaccaaatgagtttcctcaaatgagcttcttgaaaaacaccatactgttacccaaattttatattatgtgtgttcactgaagattaaagaatttcatctggcaactgcagagaatgcgcttgaaagtttgggggcagattacatttgattcaaagcatagctctgcccatagccagttgtaagtccctaccatagtttctgaagccctttttgcttctctagtgttgttgacctggctccagttgcactgaccttcctttctacctctcaaaaatgccaatctctttctagcttcctttgtgtataatgttccttttacctggtagtatctttctcctcacactaagccctcttctcagaagacatctctgcagacaaatctctgatcaccctcaatagggcctgttatctttcaccatggcacagttataaccccttttgcctgtctgtttattgcctctcttactttacaagctccacagtggcagagaacttgttgactttgtacatcattgtatacccattgttcagaacactgcccaacacatagcaggtgctcattaaatagctgagtaaaggaataaatgaactcttcaatcagggaaccctcctaaatgtctaggttaatgagagttcaaaatatgttgactatagttgtactacactttttgtataatttatatgttcctaaaatttttgcataaatcaaattttgtgtgtatattaagggaattgaaactttaaggcgacttggataatatttccagagataatttagcttccttctgaagctcctgagcttccctttttaaaatcaggcaacactgatgatctggttggcagaataaccagctaacagatactaaattaactctcacttctccatcactgttaaaatcctggacctaatggatgaggaattactagattgtgcctgaagactggcttagcagctctgtgcttcttcttaatattaactcatatgcactcagttaaaaagactttctaattgaaaattttagcattaaagtttatataaagaacagaaagaaaacaacaataaaatatgtagaggatactgatgagaatagcgattgagaatctgttcatgtgaagaatacttgagggaactgggggtgtgaaactttgagggcataccatggccgttcttagatgtttctgggccatgagatggaagggggagcatactttttctgtgttcttccacagggcaaacatattaatagaactagtaattgaaagtcattgagaagtaaattcctacttagctaaaggaagaattttatggataataaacttgtgtaaatatagaattgttgtctcaggaaatggtgagtttgctattactggaggtatttaaactgactgatgagaacttactggagacactagggtaaggaatccagcatcctaaggttacttggtttttcactgggttgagaggcaggtccgtttacagtggcccatggcactgatgaataaggagctccaaaaactcatgaaacaagatgaagaaaattaaatttagcataggttttctcaaaaactcttttatgtttgctttggaatactaatcagagaatctacttgaaggttttggggggcattgtgttgacatatgatggatcatatccagtagcaacaactggccacctaactgccttcagaaagaatgggctgagttaactgcaggacttctggtttactaagttgagtttgcaaattgggtccctgctacctgaagtcctgtttctcttcagtgcaaatctcagtttctcagctaaataaatattaaacaaatatttaaagagtatcaccctggggaggagccaggtcatctgcttggacccctctgtgtattggatggattggtctttgcttaaacagttcatggtagaaaatagaatttcaggctctaggtgttaagttacatatgtcccaaattgtatctcatttgggaataaatggaaacattaaggaattaaatactttcatatttataattttttaaaatatatatagatcagtagtcaaacaaaaaagatgagcactgttgctgttaccaaagaaatattctgaagtcatttgctgcttactttcctgaatttatctgctaacctggaaacagcagtcagccacatgagttctggcaacctggctgtttaggcagctggttgtagcaaagttcccttttcaacatcaggcaacactggtgacttagttgcttttttggcattatgcataaaatatgaagtgatagatgaggtttcattttatgagccaaaatagctcaaagcataggtaagatactgtcatataattccaattactttcattttacaaagatgtaaagctagagaatcaggccatgacagatcaaatatttctaaaaatgccttgtcatgttactgacagtgtcacaagcacacacatttcatcaagctctgtgcagtacttttctcctcaataattcatcggtattatgtgttgaggaaagtgagggaccctgaatggagggaccagctggagccgtggcagagaaacataaattgtgaagatttcatggacatttatcagttcccaaataatactcttataatttcttatgcctgtttttactttaatctcttaatcctgttatcttcttaaactgagaatgtacatcacctcaggaccactattgtacaaattgattgtaaaacgtgtgtttgaacaatatgaaatcagtgcaccttgaaaaaaaacagagtaacagcgattttcagggaacaagggaagataaccataaggtctgactgcctgcggggtcgggcagaatacagccatatttttcttcttgcagagagcctataaacggatgtgcaagtaggaaagatatcactgaattcttttcccagcaaggaatattaataattaatactctggggaaggagtgcattcctggggggaggtctataaacggccactctggggttgtctgtctgatgcggttgagataaggactgaaatacgccctggtctcctgcagtaccctcaggcttattaaggtctggaaaagatcgcgtcctggtaaagttgaggtcagactagttctctgctctcgaaccctgttttctgttgcttaagatgtttaacaagacaatatgtgcacagctgaaaacagaccctcatcagtaattctaattttgccctttaccttgtgatctttgctttgccctttgccttgtgatctttattgccctttaaagcatgtgatctttgtgacctattccttgttcgtacacccccaccccttttaaagtccttaataaaaacctgctggttttgcggctcaaggggacatcacggatctaccaatatgtgatgtcacccctggaggcccaacagtaaaattcctctctttgtactctctttatttcttagactggccaactcttagggaaaatagaaagaacctacattgaaatattgggggctggttcccccgataattatgtggctctgactagaatgtataaataatacttgtgattcaattcatttgaatatccgtattcatggcatccttttataatgtgtaaaaatcaaaacaactgcaaaataattcaacaattgcacatttcttttgtgatctgttaatctctcatcccctgggccctggtaagtatgccaaatattaatgagaatcaggaatgtgttggttaaaagagtatggacttttatattctctttcagagtggctgtgtcatttttacattatttatgcccatcttaattcaaactgtgtttatctgttagtattttctaagtttctgtattttaagagggacacactgctattggcatagcaaacaagaccctcagtctgtaggcttttcatttatgacagttttactgacatttaactcttacgtgggcattacttaaatgttgaatagtgcatgtagaacctgctgacctgaagtggagggcacctcttgggcagggtagtgtgagcttttgtattcccaattaagttgggagttaggttctcctcccaactttgctactgacagctttatctcaggcaggagtcacctctgcgtgtgattcatttacttattcaacagataattatggagtgctgactgtgcacaggagggatagagctgcagatgaaataaacaaatatccctggcttcacagagcttatgttatgccggtgagagataggcagtaagcaaataaatagacagataataaatactcgtttagcggatagtgataagtgcaatgaaaatagcaaagcaggggaatggagagctttgggagggtgggagtatggtgaaaagaggtgcaattttaggcagtgttgttcaggaaaactcactgcgaagcttacatttgatccatgaggatctggaagtccgggaggtgagggagagccggatatactgagcatcctgtcataattgattgaagtgggaaaagaggtcatgatgggatcagtcctgcaagcagttactgttgccaaggttgggagtgtgggtgggggggcctgacgtaagggaggaatagagggtcttactaggaactagctctatctcagctcctggcatcagtttattcaacaaagatacctggaaaattatcaatttattcctttagcaaacacttattggtgcctataatgtgccaggcacactgctagatgctgggttacgcaaatgaataaaacatactactgtcttcaagggacttagcgtaatagaggaccagacataaacacaattaaattgctgtaaaatgtgatcagtttacaaggcatggaggtaacacagagaaaggggaggaattcattttatctggcattattagggaaggctactagcagggaggaggtaactgctgaaattaattttggaggaagaagaaaaatttgccatgtaaacaaggtggggtaaaaaggcaattcagatgaagtaacagccagatctaccatatattagagagagtacagctggcttaatttttctagaaaataaaatgggagagaagggaaaatggatttgacggatttttaggaagtaatattggcagtatttagtgattatttgcatatgaatgtctaagttgactggaaggcaaaggcttttggacttggagacttaggtagatggtattaccaccaaaaacataatgtatatgcagtcaaatgctctacccctgagctatactccccgaaaaaataatgtatgtgaaggaggagtggtagaagtggtggagaaggagttaatattgagatcatttcttatgtggattcaagaagttcatggctgtaattttcttttgagtggaaatgaaaacagctttccttctgtagtagatgacatgatttagacttttattcagtggtgtgctggtaaattggatccctgaggaagaaaaaacaaaccaacaacaaaaccattatttgcataatttgctgattcttgtggtgtaaacagtcccaccagatgtcaagctaatcatagtttaaccgtctgctcacacatcactgtgtttcatcccttgacaagtatttgctgaactttcactaggtgcaaggcatgcagctttgtgctggctgtttctcatttacttctccatatctactttccactctcctccatcctaactcttcccaggggaggccgcttcaacagtggctactttctagcttcctgttgggttcagccaatggaagccaccagcatgagatcatagtgtgggagaatagacagtttgggtagtgatcccctggtttcctttctgccaggttacatgggttgactgcaacccactcactgtaagaggccacgacccctatcaagcagccttccccatacaactctctccaagttccagaaaattctttttccccttgtctcttaaacctagggtgctaacagctccctgcagcagcctactgtactatgccttgttggtttatctaaaccctgcctgtaccttttccttctgtaggtgatcagagcccttcattaaacattctgcagtgaacctgctttagtggctcacctctttcctggtaggatcatgactattacaaatgaagaaaaagaaagacacagtcctggattttagagtcagaccaatgtgaccaaaaaataccacaaatgcttccattatttatcttctgatgggagacaatgacacatgtaaaaattcccttgcaccgctgtccatccccacgtttagtggagtagaaaccaaagaagcctcttttctgcttctcataccccgctaagcctaacctcttatatggtctcttgaggtcgcagaagatgctgacataggaaaccaatgctgttcgcttatcatagggagaacaagccatctattgttatttgggttttccagtagtgttgtcatctgttgatttatgttcctgtgttatctgttgctcatagattgtgcaaggaggtcagataggcaagatatttgggagcactggactggagtcacagtatttggctatgaaaatctgtttaggcttcaatttcctcataatgcaaaaggagaaaatgggagtagattatcttggaagatccttccagcattaacattctcttcacgactaagtaagttctgcagctctgggaggtgcctgtgactatgattttgtgagcatttttcactgaacagctcagcctaacaaagacaaacttaggaatgtatttttaaaaagatgattgtgtgagtcttgtcaatgaatagaacatcaaactcagtagcatgcctctgacaatgtgatgtgtcaagaaaagtgtattagttatatattgcaaactaccataaacctatcagcttaaagcaacacacatatattattatacagttgctatgggccggatatctgggagtggcccagccaggtcctctgctttagggtctgtcacataggtgaattaaagatgttggcagggttggggtcttatctgaaggcttgacctgggaaggatcaacttccaagctcatgtgattcttggaaaaacttcagttccttaaaggctttggttggagggtcttagttcctagctgtctattagccagtggcaaccttcagatccttgccatgtgggtctcctcaatatgacaagttgcttcatcaaagccagtaagggagagagtctgttagcaatgcagaagtcacaatcttatgtagactaatgatgaagttgacattccattaccttctgttggttgggagcaaatcactcaggcaacctacactccagaggaggggattaaacagggcatgaataccaggaagcagagatcattgcgggccatcttaaagtccacctgtcacaaagattctgtttttttttttctcatgaaaaaagagttttaaattctgagttctcctaataatatttaaagattagtttatttgccaaaagtaaaaagtgacaattgaatgcaatgtgggatcctaaatggagatcctggcaaaattcaaatagggtccttagttttgttaaagatattgtatcaatgctaatgtcctggttctaataattatgctacagttatgtaagatgtttaccttagtggagtctggatgaaggatatatggaaattttctgtactatttttataacttttctgtaagtttaacagtagttcaaaatcaaaagttaagagaaaaatgatttataaaacttaaaaatccattaaccatataagcctgctttgtggctatgacttatttcataatttaaactttatgtccttatcagaacttgttttttgcagataaaatctatatattaatttgtatatatactataacaaaattatttgaagataaattctctaacatttttatagataaactgtacaagttttggtagataaataattttataacagccttcctagtgagaacaccataaaaacttcactatcactatattgtagtattatttatatagctatcaaatgtttgaacaaataattatagaggaggtataaaagctttctgctttaactttagttgaaatgtactaggtacttttgcacaacaccaaatgcacttcagacatcaatttaaaataatcaccctttctaaaatagtttttagatagctaaagtggtctccttccctgtgcagagctgttttaaagtcatcaatctgtttgttgcttggatatagacacatattccaaaatagtgtggcctatctcaccacgctgttccatgtgatgaaaagcaaaatgcttcaaccttccctaggcagttgaattttatgcaaagtaagaaaaaatgactacacattttgctcactgttggaaagtgttgctagttattaataccccatcactatttcacatatcctggtccagcagtttaaagcttatgggtctcagttggttacacctcttaagagaactatttggaaacacagtagacatttttcttaggccctatttttagaatggagggcctaatggtattttaatgtctctatatattcccagaacaaatcttgaggaaaatgcctgttaccttttgaaatttagcaaatctggtgggattatcagtgctcctctgagaaacattgccttaaagaatgaattttgacttacagaatgttagtagtaaaaggactatgaaaaatggtccaaactccagctcttccaaaaccttcacttttcaaatgaggaaactgagttttgacatgagtgagctattgcccaagattcaacagtggaggagtggccatgtgaaagttgcagggtgatagactgaggctttcctgtagaaaaatgaccaccgtaagagtcaatgacaatgattccatttctgaattaaagacttaactttagaacttgaaaacagtctgctggcctcctgtatgaaacttcatttttgttaccctagaaggttctaagaaaagatgtagaatgataaataaaatgaaatgaaatgaaatgaaataaaataaaataaaataactcagttcagaaatgaggaaaggtccaggaactgcttgggagagttgggctccagagtgttgttcagtttgcagacatctttctcatcttcaaaaaatgttgaatgtttttttttccctttaaatggtatctggaatttcatcagttagagattccattgccccagtgagcagtcttcttttaaagatgcaaaaatctctgggagggttaagtgttcatctattattatgcattattctgtgtttttttcatctattttcttatttaaaagcttaattgagatcagctgcaattgggagtactgttttgattgtaggaagggaataatatgtttcaagcactctggtagaggtggccatctaggtggggtgctggcatcggggtgatcacaagggcattgggaccctgggaccttggtcaagaactagaaggcaaaggaggaacaccaacgacaagcctagcttgttttatagctttactgtgggctggctcacacctagagaagaaagcacaaatgtatttaccctttccttgtgtttcttagcccctttgacaaatactgattcaatgcacatttgtaggcttttgtagaatggagatctcacccatcacgtatatgatggtgccactcacaaagtgcatatcaagatttgcactcttggctgggtgcggtggctcaggcctgtaatccctgcactttgggaggctaaggtgggcagatcacctgaggtcaggagtttgagaccagcctggccaacatgttgaaaccctgtctctactaaaaatacaaaattagccgggcgaggtggcgcatgcctgtaatcccagctactcgggaagctgtggcaggagaatcgcttgaaaccaggaggcagagcctgcagtgagcctatggcgccactgcagtctagccagggcaacaaagccagactccatttgaaaaaaaaaaaaagatttgcgttgtgctttcaagacatgcattcatgaaattaggacttactcgtagtacagtagtaaatagaataggtcctgggtcaatctgcccgagttctaatcccggctctgactctcattgcctcagtgaacttggacaaatgtcttatttgtctgtgcttctttccttatttgtatattggggattagtaataacacctattactcatcctgttctgagaaatcagtgaggtgatgcatgtgtggtactaagaacagtgcctggcaaacataagtaactgcatatagtaattttatgttctccaccttcctttactgtgtatcctagttttatttgagaaagtatattcgctaacttctctgggataagagtcaggacaggcaggaaataatgaaaaacagtgttatttaagtgatcctttcttagtcccagaaatatctaatatatttcgggtgtcttctttataccaagaaacttgcctgaaccaattcatattttatatgctgaagctaattctttcaaatacaaaacctcttcttcaacatcctcactgttgaatttggttacatattaatgtatgtagacaattatatgaagatcagtattccaaaagatactcagttttaaggtgactttctgagaggaaggtaagatatttttatctgaatgtaattgttgaattccctttttccatttttatgtacaaagatctctgccctaagattattttacagaccctattagtttcatttgatctcaacggctggcctatccccttatgtttttgtaatctgtagaagtatgaatggggtattgtaaatgtgcttgttggatcaaggagttttaaaagcccaactattaggtccttagaagagaagagacagggagagtaggtagaatgtgtcctgaaacttgaaacaccaggattctattcctgcttctgccattaggagctatttgacctcaagtctgtcctagaatctccctggaactatctcatttgaaggatttgaataaggtattgtttaaggtttgttacatatctaatattgtacgattctgtgatatcttattggctccacatttgtgaagtgtatgctttgatttaactgacatgtctattttctttcccagtttccttaaaactatttgaaatgcttttagcaattgaccagccagggtgagagatgcagccttcagctgtaaagtagaaacaattacctgggtctgcaaggaagcaagtccgtggccttgactttgttagtatcccatctccatccacagagctatggatctaggactgtttcatggcatgttaagtgaataaagataagctctgggggcatcattactcatactattaacagacaattgtgtgcatttttttttattttgcagatgacagactagaaatctgaaaagataaataactgtacaaggtcttccaagttgccactcatctgtataatgttcattttccagggaggctggggaagttaataatggaacagcttactctctgctgccactcagagatacttgaatttctcaaagggaagataaaaatacaagaataacatatttttgacctacttcttcctttgcaatctgagggccttcgtttccatgttaattttccccttttgatattaaatagagctcttttaggctgacaactatatattttagcccagtaaatattaaacaaattattgataaatgttcctacaagaaatagttagatgatgtggaactagctatttcttctagaatcaagaccatagaatagctaaaatcactgtcataggactgaatgtaaaaatttaagttgctgactatagtaagtataaattaagataatatcacaacacaggggctaactttaatttcactattatttcaaaacctattctgtaaagacactaattttcacctttctctttttttttttttagtcatggactcctgccctgtaggtccttctgtgaggctgcaaaagaaggctgtgaatcagtcctggggatggtgaattactcctggccggatttcctcagatgctcccagtttagaaaccaaactgaaagcagcaatgtcagcagaatttgcttctcacctcagcaggaaaacggaaagcaatgtaggtgtctgtgtttcatttcatttttagaagattttatttgagtatgccatttatacaggaatggatataaataataagtgtacagtctgataaattttaaccaagtgacaagatccatgtaaccagaacccagatcaaggaatagaatattaacaacatccccagaaatgccttcaagcccgctgcctgtcatatctcacccttccaaaagaaacctctatccttacttctatcaccttagttttgcttacttctgaacttcatataaatggaatcatacaatatgtaactttttaaaacctgtcttcttttgctcagcattatgttcaagaaattaattacatcttcatattgtggttcattcattctcattgttatacagcattctaatatatgattgaaccaaaatatatttttccatttcactgttgatggacatttgcattgtatccaattttcagctattacagtgatgctattactattcttgtgcatgtctttttttttttttctggagacagagacttgctctgccacccaggctggagtgcagtggcatgatctcagctcactgcaacctctgcctttcgggttcgagcaattctcctgcctcagcctcccgagtagctgggattataggtgcacgccatcatgcctggctaacttttgtatttttagtagagacatggtttcgccatgttggccaggctggtcttgaactccttatgtcgtgatccacccaccttggcctcccaaagtgtttggattacagacatgagtcaccgttcccagcctcttgtgcctgtctttaattgaatatggttatatttattcaacaaaaaagttttctaaagtggttgtaccaatttatgctcttaccagctccttataaaagttgtagttgctccaaatccttcccaatctttagcattgtcagtctttttcattttaacaattttgatgggagtattgtgaaatgtctgtccaaatattttgcctattttttgatggtctgtctttttgtcttcagtttatagttttgtatgaattctggatacaagtcatctgttggatatatgtattgcaaagatctcatgccctatggcttgcctttctactcttattagcatctatgatggaatagaaggtcttaattttaatgggtccataatatcaatcttttcttttgtgttttttttttctgtgtcttaagaaatctttgctcacccccaaacatagaagtttttctcctatgtttcttctagaatctttattgttttgacattcagttttacatctactataattctggaattattttttgtgcatggtgaaaggtaaaagataggaattaatttttttctatgtgtatattcaattgacccaccaccatttaattatttagaagacaatttttccctctgcactgtaatatcactgctgctatcaatcaagtgaatgattacatgtatatctatttttgaaccctctaattgacagaatagaattaagacaataccacactatctggattactatagttttatagcatctttatattgaatattatatgtcctctatctttgttcttcttaaagattgactatttttggccctttgcgtttaatgtaaattttaaaatcactatgtaatttccacaaatgctgtttttgtttttgttttgtttttaaattgggactgcattaaatatatagatcaaattcaggaaaatttctttacaacagtcagtcttccaaccataacaattatatactatggtaatatttaagtaggtattttcaatgaggcattttaaaatttctctcaattatgtgttataggtttaaccatagagatcttgcacatctttagatttatttgtggtatctggtatttttgatgttattgtaaattatatatttttaaaacatttcctttattttctgtttttatgtatccaagaaatttgataaatcactcaacaatttttataatttgtctgtaaattcatttgaattttctaagtacacaatcatgtcatctaaaataatgacaatttatttcctccttttcagtcattctgctttctgtttcttctatgtcaggaagaaggttttcaatatttcacctttaattctgatgtttggtgaagggtttttaggatactcttggtcagattaaggaagctctttctatttgtagtttgctaagactttttaaaaaatcctgaatgggttttgaattttattatttttttctatatctattaagatgatgtattattttttcatattatgctagttaccttttagaaatgccagctttactgagatcattcacatactataaaattcatctctttaaagtatattattaagtggtttagtatacacacagaattgtacaaccatcataatcatctataataatttcagaatgtttttatcaccctagaaagaaacctacacgcattagcagtaaattgctatccctctcctcagcccctggtaaacactaattaactttctgtttctataaacatgactattttggacatttaatatgaattaaatcatacagtatgggactcttgtgactgacttctttcacatagcaaaatattttcagggttcatatatgctgtagcatgtattattagtacttcattcatttttattgtcaattgatactccattgtaggaatataccacattaaaaatccatacattaattgaggaatatttggactgttttcacttttggactgttatgaataatgctgtctgtataatatttgcgtataagattttgtgtttttgtgtggacatactgttttaattctctcagctatatacctaggagtagaattgctgtgactagtattaactctatgtttaacattttgaggaaatgccattcctacaaacaatgtatgagggctccagtgtttccacattttcaccacacttgtctcttttgtttatagctgtcctagttgatgtgaagtggtatcccattgtggttttgatttgcagtttgctaatgactaattatgttgagcaacatgtcatgtgcttgttagtgttagccatttgtatgccttatattgagaaatatctattcaaatactttgcccattttaaaattaggttgcctctttaaattgttgaattgtcaggttctttatatattctggatgcaagtgtgccttttaagctatataatcttcaaatatcttcctacattcttcgggggctgttttcattttaacaacagtttttaactttgaggaagtccagtttatctgtcttttcttttgttgtgtatgcttctagtgtatgtattttaaaaattggctaatacaaggtgactaattatttattcctttgttttcttttaagattttaatagatttagctcttatatttaagtcattgatccattttaaattaacttttctgtatgttgtgaagtaggagtccaacttctttcatttgcgtatggaaattcagttgtcctagtatgtattgttgaagagctattctttcccactgaatggacttggagccccttgttaaaaaacaattggccatagatgtatgggtttatttctggactttcaattattttttattgatctatctatctttcttgattaccacagtttgcaatacattttgaaattatgaagtgtgcatactttaactttttaaggattactttagctatcctgggtcccttgcctttctgtataaattttaggattaacttgtcaatttctgaaaaaaattcagctataattttgataaagattacatatgtaaatataccattcaatctttgctaaaagagctggaatggctatactaatatttgatcaaatagattttaaaacaaaattgttatcagaaaagaggagggattttttaatgataaagggtcaattcgtcaggaaaacataacacagagccagaaatacttaaatctgacagaactgaaggaaaaatagacaattcaaccataatattccactgtcaataatgagtagaactaggtagaagattaaaagggaaatacaagacttacaaagcacgataaaccaatgagatctaatagacatctgtagtacactccacccagcaatagaaaatatgtgtaaacacataggcacctaaaaatttccatttttgagcttacaacctatttgtgtttctgaatataaagtatgccttttacacacagtatataattgaatctcatatttttatctatgagacaaatctctgccttttgattgtagtgtttaattcatttacacttaatgtaattataagtatttgcatatgctgttttgaaatttgttttctctatgacttttgtatttcttgatccttcattactgactttttttgtgttagatatattggggtgtgccattttaaatttcttgttgcttggctattttttttagttattcttattggttgtgctggaacttaaaattaacgtcttaagttataacagtctagttcagatgaatcctaaccgaatttcaacaatatctacactttgcttctgtatagctttgtttctttttccttctttgtaccattatgtatacaaattacatctttatataatataatctcaacataggtttattgattatgattataaattatttatgcagttgtttttaagaatcagataggataataaaagatttatagaaaaaatacatttcttttatcttacttttacctatttaattacctctaccaataccttttatttcttcatatggattcaagttgctgtatactgtccttttattttatcccaaaggacttcctttagtacttcttacagggtggttctgttaatagcaaattctctccacttttgtttatctgggaatatcataatttgtctttcattttgaaaggatattttgctgtacatagaatttctgtttgacagtcttttattttcagcactttgaatatgttatcccacttccttttggactcctcagtttggatgagaagtcagatgttaacctttctgaagctccattttatctgatgagttgcttatctcccagtgttttcaaaattttctgtgtctgatttttgatagattaattacaatgtgtctaagtgtagatcctttagagtttatttgaatttttgtacttctttgttatgcagatgtatgtttttctccaaatttgagaagttttcagctattatatcttcaaacattctttctgactcattcttttatctctttctgggactcccattatgagtatgttggtacatcctccaagtcattaaggaccttttaatttttcttcttttttttctttctgttccttagactagataatctcagcttacttatcttaaagtttgcggattttctcttctgcctgatcaagtctgctgttaagtctttctagtaaatttttaatttcagttattatatattttactgcataatttctaatattttaaaataatctatatatctttattaatattttgtattttttgagccattgctcttatacttccctttagttctctagaaatgtgttccttagttctttgaatgagttaaaataactgatttaaaagtctgtccagtaaattcaatgtctgagcttcctcaggaacagtttttgttgactgttttttccccctctatatgggcatatgttccagtctctttggacatcttgtaattttttgttgaaagttggacatttaaaataatataatgttcaactctgcaagttgaattcttccccccaacattagttgctgtttctgtttcttgttgctttaattattgttatttatttgttcagtgagttccctgaaacaaattatgttaagtttgttctttgtcatgtctggccactgaagtttttgcccagatagcagcctagtggtcaactaatggttggacagaatttccttaaatgcctttaacaggtatatatcctagtctttgccaagggattctgtgcatgttagggtgcatagtcagtactgtagcagagtcgacactatagcagagtcaatgctatagcagtcaatactatagcagagtttacagctctgccttatccttaaatttctgcttgtacagggtctcaatgtctgccacaggtgagatatttgggcctttctgggtccttcttaggtatatgcatagtcctgcacattcatgggatcttctagattctcagcaatgtattagagcttttcaaattttcctacaggaattccccacatttttcttttaatttttctggttagcttcttgtttgccccaagtgatatccccacctcagacagttacagtgttaatcgattattaatttttttttttagaaacaccccggggaaaaggcttttgcactgagtaagctcttattcaggtcaaataatcacatttgctctgagtttccagggagctaacagacaagaaaaataatgacaattctttggtaatggggcattgtggagagctccaagcatgttttgccccttctagtggctgcttggctgctagttttcacagctgatgtagttgtgaggttatctagatcaataaccatatcttatcacctgctttcttagaccatgtctgacactaggtgctaaaagttgagttttctgcaaatagtaactgagatggagtttggtgtacagagtatttattaagcttcagcctttgtgttaagggagggagagaaagcagaattgggcagaaggagttgaaatatgatccaggcccaccaaagcctcagctaaatccttggggagttctggaatgtattaagcctacaagagttatctcatgttgatccaaaatagttgagtctatgtgtctccacctcaatcagtcattggatgtggtccttcctgggaagagtgtgccactgagtgaggcagatctcttcagtgttccacagctgaggcaaaacccgaaggatctgacagctaaaggcagtgggccagcaaatgtagcaatagattcttgaagggtagacatatatggccagatcgtatatgtgatatgggccagacacatatatgatcacacgtatgtgccacatatatgatcactaggcacatatggggccagatagccttaatttaatcagagactaagctgattttgcctcattgttataaggctccgtctacctctggtttttctccattctgagagtgtggttctccagtagtctcaactgagaaactggtaggcttactatattcccttcctccttgagtagttccaaattttattttattttctgctcagagcagtataatttctgtaatttccattctacttttctgaagttttctgcttagttctttaggctcctgccctctgtggcaaatgccttgcaaggcaaccctcccaagtgatagatctgcttctctatgtctcccctttcactgctcacctggccccttagtatctggctgcttcagcaacaccaaactctaatttttgtctcttcgcctttgtggaattgccaaaagttctgctggcttatcttgtctttgcagtggtcacatgtgtagcaccatgccaagaactggcaagttccatgaaggacaaggcatacacagattgtagactcttagggcatgttctcacttagctaaatgataagaatacatagacacatagaggggaacgactgatactggggtctaccagaaggtggagggtaggaggagaaaaaggatcaggaaaaataattaatgggtactaggcttaataagtgagtgatctgtacaacaaacccccatgacacaagtttacctatataacaaacttgcatatgtacttttgaacttaaaataaaactttaaaaaagaatgtagactctttgttctatagttatcttctctctgggaccttggccactcacatcttaattatctcatcagctctcagatgccttccaacagatgtttcttgtgttttatctggcttttctagttgtacttgacaggggcattgatctgctgcaagttactacctcatggccagaaatggaagtttgttttctttttcacacgttgtttagtagaggtctgctgctaaattaggattccctccaaaagatagtatatagctaaaagccactagaaggctgagtgagtaaaactgaaagagaagtcctttaagtcttttctgttttaactacattttctcctgttttataagaatgcttacagtcttcattagtggtaatttggaaaatgtaacccattgatacgggatttaagaattcatagagaaaacttgaaaataaaaaaatcatcagtgttatgtaacactgttgctcaaaacatatcagttcttgaaaatcaaaataacattattagtatcctctttttttttttttttttttttttaagatggagtctctgtcgcccaggctggagtctctgtcgcccaggctggagtgcagtgacgcgatctctgctcactgcaagcttcgcctcccgggttcacgtcattctcaggagaatgtctcagcctccggagtagctgggactacaggtgcccaccaccacttccggctaattttttgtatttttagtagagacgtggtttcaccgtgttagccagggtggtcttgatctcctgacctcgtgatccgcccgcctcggccttccaaagtgctgggattacaggcatgagccaccatgcccagcccattattagtattttttaataacaaactaaaatgccacttaaaacattggctctctaatatcagaggatattgcaaatattctaatcttggaagagattgatgatcttggaaaaaatcttagaaagattgatgaaacatttatatttaaaaatgtatgtttaaatagaacagaaatttccgaagtacactcatctgagatcctctacttgtcagataatcttttttagaattcttggttgtaatatttttttcatgtagagataattctccaaaaatgcatctgacaattggtgtttgatgtaatatttacctagaatttaaaataagtattctgtctcttgctttatgggtaaacaggatgctagacactattcatagtttgtgtgctatagagaaagtcactgccagctacaatctttgtatatgcataagaatgtaatttcttgtatacacagacatagttactaaaaagtgtaagaatatattgtatgccaaccagcaaagtgtttattatataatacagtcttaatcatataagggattatgctatagagccactttataaatacaactaatgtagtttttctttcattttttcattcaatattgattgagcactttttcttttctgcgtatcattccaggtactctgaaaaagtaaaagtaattatgatgaccataattttaatctgtatctgtttaacgcattggttcttcactaggggtgattttgcagcccccatttgggaacatttggcaatgtctgtagacatttttggttgtcacaactgtgagaacagggggagttgctactaacacctagtaggtagaggcaagatatgctgccaaacatcctacaatgtacatgcaggacagcctcccacaacaaaaaattacatggcctaaaatgttaggagtgctgcttttgagaaaccgtggtccagggctatatgttttgcaaagtactttctaacagtaataattataataatagtttaacatacttcctacctttaaggagtgttaaacctaatctgtgatacccacgtgtaagaaacagaatgttaaaagagcattaataactacatgtaaatatgctgtgatacagaaagtataaaaggacacaggttaaatgtcaatggaatagagtgaagtcaattacataaatgaatcctgaatattttaaaagagaaaggctcctacttagcaaaggggacggaagaaggtgttctggtgaagatattcggcactgtggacttgcgttgggtgtcaggttcctaattagccgatgaaatgaatggtgactaaaagttgactcttgtctcaatcgtcttcttccaacttgtgaaatcatttgcccaaggaaatagtaattccctccctttacattatgtaccccattctcctttctgaagtgctttcacagctgttagttcaatttgctttcagagtaaatctccaaggtattatcatctttattttataaattaagaaactgaggttcaggaggtcattcccagcttattttaaatccagtcccccaggctccatcctcccccaaatagtccaccatcctgggaccatcttgagatttgattattaatccttattaatacccgccgctacagcccccttctcacaagagctctcacgtgtctttccagagtgaatcgagccaaaacccacaacttgtaacagctgcttttcccaatgcttagctctgtaaattcgattcatcttctcttaatatcctttaagtcagtcataactcctaaggtattttgttcccatatagaaggacacacagttgtcttatcctttctatcttatgttgatgctaggtcttgtaaagtaaataatgtgctaaagtgataatgctgtgggaactgttcgtcagaggttttaaaataaacatttgtgtgtttccatagttgagatgtgagaactcagggggctaaagttcaggacctatcaatcatgctgagctttctgactaatcctttacctagtctgtaatcatatatggaaagttgattttaaatcgtatttctgtgggcctgaagagatctctctgccatgaaagaacttcagttatttattcattcattttcctcttccttttcatagcaccttatttgctctgcctagctccggttgctgctagcaaccatttcagtgcacaagcagcaaaatgatagtttcaggatcctggtaaaacacatagtccgaatttctcctattgaattgtgggtttatttggaagaaataatttaatactatttctttgaggtacttacatcaatattttgctagagatagatgaggtacttatatggatattttgcaaatagcatcgtgaaggcgctgagcatgtctctcaagccctttaaacctctattgctccaactttacaatagaaataataatacctaagtggtagaattgtgttatgggctaaatgggataatgtatttcagataacttctttatttgagagaagccacatgccctgtgcaaatgtaaatccttcaattcaacagacatgtagtaagtatattctatgtaccaggcagtttaccaggaactggagaaggcatgaagacaggcatatttttaaagagttcataggccagtggagagatggacatgggacgcacagacacagacctgagacaaggagttgagccatggtacatttgggagagacgcgagacagtggtggggtgggggtcacgggagtgggaagggaaacaggccaataaagagtagattactggccaggcgcggtggctcacacctgtaatcccagcactttgggaggccaaggatggtggatcacttgaggttaagagttcagagaccagcctggccaacatagtgaaaccgcgtctctactaaaaatataaaaaagccgggcgtggtggcgtgtgcctgtaatcccaggccctcaagaggctgaggcaggagaattgcttgagcctgggaggcggaggttgcagtgagctgaggtcgtgccactgcactccagcctgggagatggagcaaaactccatctcaaaaaaaaaaaaaaaagagtagattactaaaccagctaccatagtgggcaactggagcaatcccatgggaaaatctgggaactagtgtacaacatatggtttagaattagtctactagaggggtgagggagctggggtatgcacttcctttagtctttgaaactgacagtatctgttacagcccataaggacaatgtcctataggagaagagatgtggggttgtgaaggagggagtataaacttggctgccccctgcaatggaagacttttgtctctgttggtttcttcttcattcgtagcactctttgcctttggtttctagcacatttctattctgatctgcctgtcactgccctggccaccctctagtctccttcctttgtctactggccccttaaatgttgatattccacaggatactattttcaaccttcttttctcaacatcttatatattttctctgggaaatctcatatttgcttatagccacatatgcactgatgattcttaaatctatctatcatccccaattttattccacttccctaagcttcaaacctccattccactgtccttgcttacacctctcaagaaaaactcctttgtccccacatctccaagggtctctacctgtgtggctatatcccatagtagttctcagtagtttttgacctccaacaacatttgctaattttttttcttttttttttttgagatggagtcttgctctgtcacccaggctggagtgcagtggtgcaatcttggctcactgcaacctccgcctcctgggttcaagcaattcttctgcctcagcctcccaagtagctgagactacaggtgtgcgccaccacacccagctaatttttgtattattggtagagatggggtttcaccatgttggccaggctagtctcgaactcctgaccttgtgatccacctgtctcagcctcccaaagtactgggtttacaggcgtgagccaccgtgcccggccagcatttgctacatttaatcactccctcctacctgataaactcttcacctgacttccaattgggttttcctctttctttggccacttagtctagtctcctttgtgttttcgcctcatttcacctgtagacactggagtgcctcaggccttggatctctctccttttggtgatctaattcaggctcatggctttaaataccactggtacactgacaactacaaatgcggatctctagcccacatccctcctctgacctctggacctgcatgcatatgtatgcttgcagcatgcagacacacacacacacaaatttgccttctatttgtttctatttgagtttctaaaaggcatgtcaaacgaaacagatacaaaaccaatctgatattgcccatgcactttctcttctcccagcttttccctccttagtcaataacaatgtagttctttcagttgttctagttaaaaacttggggtcatccttgactcttctttttctctttcactccatacctgatttgtctgtaaattttagtggttcaactgtcaaaatgtatgcgtgatccaaccagtgctcactatctccacaaccaccgggcccagctcacttggatttgtgcctggattatccttccagcctcattattggcttccttgctgcctccctctgcccctttgggctattactgcctcttccttgatacctccctatgcacacagcagagaaagggatcttttaaactttcacatctattctctctaagtttcctaaggctttccctctcactcagtataaaagcccttggtctttacaactgtcaggacttcatcagtattgctgcattgcacaactgcgggagaataccagtcatatagaaagcaatgtgaatagtaaaacgggagagttccctgattcccctctcagcacatgcaacaggggtgtctcctgtgtggtcaccctgcagctcaaacccctagggggagcatgcagatgggcaggtgcagaggcctgcaagagtgcttttgggctccagccccaccgcagggtctgggggtgggtgtctgtggctcctgaagcccaagtgggcaagctcttttttttttttttttttttttttgagatggagtctcgctctgtcgcccaggctggagtgcagtggcacaatctcagttcactgcaacctctgccttccgggttcatgcgattctcctgcctcagcctcccgagtagctaggactacaggcagccgccaccacgcctggctaatttttgtatttttagtagagatggggtttcaccatattggccaggctggtctcgaactcctgacctcgtgatccgcctgcctcagcctcccaaagtgctgggattacaggcgtgagccaccgcgcccggcctgcaagctcttttaaatttgccttctgcagacagcttgtgtgttaatcaactcaatggaccctctgccctatcgcaagggcagggagccagtgtgacagccttctgtaccccaagttcttgcccagtgtgtactggaagaattagatcacacgtgagctccaaggatgagtgcaaggttttattgagtggtggaggtggctctcagcgaggtggatggggagccggaagcaggggaatggagtgggaaggtggtctttccctggagccggagcacccagcggccagacttctccgctgaactcccctctgtggccgaacctctctcttctctctttctctgccaagttattccgttttcactgatctgctggttccgatattcagccgctccgtgtgtgtgcgcgctaaggtcttgggtttatatgagggcaggatgaggggtgtggtgggccaaaaggcaactttttgggtgtgaaaacagaaatgcctgtcctcacttagagctgtgggtcttccagcttaagggtggggcctttgttggggaaccgccctcttctacccagcatttccacctcccgtctgtatcatttgtgcctcctagagttgtgcaacatagacatcccactctacattatctggccctgattgcgtctctgacttttctcctaatgtttttgtttttgctctctaggctgtagctactctgttccatctgctgcgacgttcttgccccagatatctcccctcagttcttttaatcagctgtcagaaactgtctgtagggctgttacatagaacatgctagggagagtggtcaaaaatgagatgaagaagagaagctatgtaagaaacagctgtcattattgggtagtgatagagctaaggatatgccagaattcttatgaagaaacttcatgatcaacttttctggtatttaacatttcattttgctgtaacttgaagctttaaaaatacttttaagtccctaacaacttcttttgatctgtgaccacgagaaatgctcatcctgtgagtttccactgtttttctgggagaattacaggcttgttttgactttgctatgccacatacccaggataaagaagcagtgccagataaaatcgttttcttgttgagcctaaatactacctgttctctgcgggctccgtaattcttgtttatagatcatttgagattaagtttctattctctgccaaatattgctttgcttgaagtggcacagtggttcctaaaacagaaatatagaggttttctttcctcatctgcattcattcttctcactctcttgccaagctagctgcttggcttacaggttgatagctcagaagctcaagatcataggttgatccttgggcttcttacagaatattattttgttcagtggctggagaccaagaccatcttcattttgtcaatattatgcctctgaatcagaaatcagaatcacatttcagaatcacaatcagaaatccacatttgtggtcttacagattacagtagaatatggaaatttttagcaacaagtcaaaagtctgatattatttaatatgtatgatcataagtgcacatccctgagtctattttggtcaataatcagttctgattactctaacaagaatgctgctcatttgctattcaaaacatcatctattttagttctgtattcagctttgtacgccccatcatggtcaatttaatcatagctgatagatctttacagaaccaggtaaatgaaaaacaaaatgctggttttttttctttcacatagcagaaatattagcttagttctaagtttcgtatttgtttcccaaaattcctgggaaaggatactatctatgtcttttaggtgaacattattctttaagcttaatcagttctttttgatattctcaacagtaatgtggcagttatctagtaattcagacatcctagagtttgaactctaaactctgggccacccactgaaaataatgcatgattcagaatcatcacatgaaaatctatgaatctcttttgaaattgtgacttcattctgctaaatagcattgtgagcttcataactgcaattccattgagctcagcaattgggaagcaatttgaagtctccattctcacctgctctatccatatgtttattttgtgtctgaaaccctgcacacatttaaacaaaaagttaagctcttatcgaggaggcagtgcaacatagtgttttagatatgtggtcttccaaatatttttgctgtgtaccctcaaaggattttgacaaagtacacagcccttgtacaattttaaattaatatctacaaaattttaactgtgaatgtaaatagtgtcagataatagaatttaaagactattataataattgacatataactattttaaatgtgtctagtgaaacctaaatcccatagtgccttgacattcaccaaacattaaaaaattataagctcctcttgtaacattcagcaaattttactttgctcctttttctctctgaagtcatttctatttcctttcacctacagaatttcattacagtgtaatatctttttaatgcttagattatttttatccccctaccatgcatctctagaacaaaactgtgcataaaatggaaattattactttaaaaaactttccttcagtcataagactctgtcaacagtttattttctgattaatttatcaaaaagttgtactttcaatctattataaatgtttataaataattactaaccttaaatgtgacacatattagaattccatatcttgatgtattagatgcagtttattttctttgaacactggtttgtgtagactatatcagagtttggcatcaattgtgttcctacttttttcttctagatggtagtgctttgaaaacttactcatatgattaaacacatgggcatagaaagagttttattgaataatggcattcaattatttgagaagcttcccactgtactgtcaaaaagcaaatagtaatgatttatcattaaaattatttttaatgattagatgacaacttgattagattctccttccatttttgaaagcacagacttggaaagcaccttacttgcaaatgaatttgttacccagtcagtaaagccatgcatggtctctacttctgagaatattgccaggatttatcaaatatctgtttattactctttcactttgaggcactttgtttagctctatatattcagaaaaatttataaaaaatggaaatattggttaatttcaattaattttttctaatacaatattttaataaaatgctttttatattattacatgctttaaatatatatttatcaaaacttggagctgtcagttttgttcatccagtttatgtaaaatttatctaactagtaatgccagtcttcaatgtcaaaacttattcatcaaatcagagttactttctgaaagaaataggctgactttagtttttatgtttaaatttccatacaatgaaattcactgtatgtgtgtgtatatatagttctgagttttaacacatgcatagatatttgtaaccaccacaaaattagattactgaacagttctatcatcctacatatatcatcttcgtcttgtcctttatggccaaaaccacactccaaacctctggaaactgctgatctgttctccacatctctggtttggcttttctagaatgtcacacatggaatcatacagtatattcccttttgaaacctgtttctttcacttacgataatgcctttaatattcatccatgttgttacatgtatcagtggttatttttaatgcttactagtattccattgtatggctgtacctcaatttgtttatttgctcattgaaaggaatttgattgtttccagttttttggtaattgtgaaaattactgctataaacattcacttacagtttttataggcaaatttctctaagatgaatacctagattggtatctgtcaacagtttttccagagtggctgtatcattttgcatacccatcaataacaatgtatgcaacttccagttgcttcacatcttcaccagtacttggtattgtcagattgacttttgttgtttctgttttgaccactctaataggtgtgtagaagcatctcactgtggttaaatttgcctaatgatgaatatcttttaatatgcttacttgccatcggaatatcacctttatgaagtgtctgttcgtatcttttgctcattttatggcaggagtggggggttgtttgatgttgtttgatttcttactgttgggttttgagagttctttatatattctgggtacaagtcttttgttcaatatatgatttgggaatattttcccactctctgtaccttgtcttttcattctcttcacagtgtctttcacagaacaaatgattttatttaccaattttttaatgcaacatacttttgtatcatataagaactatttacttatctcaactgcataaagattttccttcataatttctcccaagactttttcagttttcattttatatgacctgcattgagttactttttgcctaaggtataaggtataggtcaagtggtatttttttccttttccaaatggatgtccatttgttccagacacatttgttaaaaggcctatatttctcctattaaattgcttttgcacctccatcaaaaattaattgaccttattctcgtgggtctatttctggactgttcattctgtttcattaatttatgtgctcattccttaaccaaaccacattgttttgattagtatggcttgatattaagacttaacaaagaatagtatgagtttttccactgtgttatgtctcaacatttatttttcagttgtagttctttgcctttctatgtaagtgttagaattagcttgtctatgtctacaaaaaaaaaagtgttccaaaaatcttgattggatttgtattaaagctgtggatcaatttggggagacttggcatcttaaacatattaagtctttcaaaccatgaacttggtttatcatttatttaggtctttcttgattcttctattggcatttataatttgctcatataggtcttgcacgtattttgttagatactttgagagctattgtaaaaggtactaattttaaaacattgagttcccattgttcattgctagttatggtaaacattgttctaagatggttcctagggttccagttctgtggttcactcaccctgtataatcccctcacctctgaatgtggggatgaactgaatatgatgttgcagtcactcctataattagattatgttatttggcacagctgactttaagaaaggtagaatatcctcagtagacctaatcaggtaatcccataaactaaatctcattttctaggagtttttattatgaaagatgttgaattttatcaaatgctttttctgtatgagttggcatgatcacgtagtttttctttagcttattaatgtagagattacatttattactttttgactgttacattagccttgcattcctgaataaattccagtcatttgattattttgattttattttcttagtttatcttatctgggttctgttgagattcttgagttccaaaaaaattccaaagatttaggttcttgagtctaaatttatatctttcttttgatttagaaaacttcagccattaaattttcaaacttttcttctgtacaaatctcattctccttcctttccttcctatatttttaatgacatcaatattggaccttttgataatatacagcaggtacctgaagttatgttcgttttttgaaaacttttctcttttgttcatattagataatatctattaatttagctataagttcacttactctgtcttgtcatcttcactctgcaatttcagtgtcttttaaaaatattttagttattttatttttcagttctgagcttccatagctgctatttctttactgataacttctatccttcattcacttcaaatttgttgacccttacttcatggagtatggttattacagctgctttaaagtaagtctttgttcaataatttcaacatctaggtcacttcaggggtggtgcctattaattatcttttcacttaggggttgctgagaatgccctgcttcttttttttttttttttttttgagatggagtctcactctgtcgtccaggctggagtgctgtggcgcgatctcagctcattgcaagctccctcttccaggttcacgccgttctcctgcctcagcctccctagtaggtgggactacaggcgcccaccaccatgcctggctaattttttgtatttttagtagagacagggtttcaccgtgttagccaggatggtctcgatttcctgaccttgtgatcctgacctcggcctcccaaagtgctgggattacaggcatgagccaccgtgcctggccttgccctgcttctttgtatgttaattaattttaacttatatcctgggcattttgaaaatattatgatattctgggtcctgttagaattctctggaaaatgctaattttgtttgtgtgtttgtttcttttcatagtcagttgacccagttaagttccggtcacaagtcacattatgccttctaagggctttgtttccaatgtcagttcagttttcaaagcctttgtagtgctctctggatcctccccatgagtgtatttcccagggatcagtctgatatctgggccatggattacattgttgcttacttctcaaagcttttggtattctatttcaaatcattttcatgcatggagacctgagggataaacccaggcaggactttatacatagctctgtgggatctttcatctcaagctccctcttctctgtgatctccctgaaactctctgacttccagggaccatttgccctggtcctctgtcaaaaaagctctagttttagccttttgcactgttgcagccaactctggggcaaataggcaaccttggctgctgctgccactgttgcatgagtacagcttccatgagcacagcttctagggccccctccaagggacggtcaggagaagagatgtctcaggggactccccgtcctttggttttgcagggcccctcctgcttattcgtctgaccaaggagagagtttctcttggtcaagactgctgcacagttccatgattttgttgcattcattctatgttgggaaatatgagtagaaaaagaaaaacaccagaaagctcacctccttattactctttctttaagtttttatttcccttcctagtccgcttactggtctttactgtttggataccacagacaattgctttgtgtattctgtccacaacatttagttacaatcacagggggaggtaaggtgggacatttttactccattttaactggacctagaatcttagaatcccacgtttcacttcaaattttaagatacgtatttcggtagacagatggacagacaaaataaaataagtttgttgcctgaaatgagcctctggtcctctgctttcggggtttatttgtgctcttttaactttgtccttcaaatattttccttcaggaacaatatcttctctgacaacatttggagaatgaggaggcaggatagcaagatggaagatattttaaattgtctatgtgtttggaactccagatgttttatacccaggagcatgtgccatagcaggtttgaaatgtttaaaaagtgcctttcttttgtcagatgaaaaaaaggaacattgcgaaaagggcggtaagaaaggacgttatcctgcatgtgccctcagataggcaatgatagaaaagaggaaatttaagggtgtggaaattgattcctttaaaactatctctgcctgtaatatacccttggaaagcccttgtatatctctaaggaaacaccttccacagttagaagatggctgttgtaggattaagcagacctggctattatcctggttccacttctccagtgataacttatgtgtgaaaacaggcaaacattggatgaaaatggaacgtgagtgatgggaatacatgtactcatatgcaagtgattgcatcagtatgtgtgatgaatactaagctcagaaaaatgctgaaattgtgaagacggaatagctaaatgttagaagctggtggggtctgtggaaatagtgtttggattaaagatttgtagaataaaaaatcaattaattttaagccatgctgcactctggtgaatatggttaaggtagtaacagaataaaacaaacaaaatgaagaaacgatggccagactttgcaattcaaataatggtgttttcctaatagtgtttaataataacagtgttatcataatagtatgtatcttgctgagcatttattatgtactaagtgctgtgctaagccctttagatacatgttcttatttactcctcccagcagcactgtgaggattatggttattcttcctgtgatgaactgcgtgtttgcatcccccacccacaaatttacatgctgaaaccgtaaccccaagaggatggtattagaaggtggagactttgggagataattaggtttagatgaggttatgggctgggtgcagtggctcacgcctgtaatcccagcattttgggaggccaaggcgggcagatcacctgaggtcaggagttcgagaccagcctggccaacatggcaaaaccccatctcttctaaaaatacaaaaattaactggtgtggtgacacacacctgtaatcacagctacttgggtgtctgaggcaggagaatcacttgaacccaggaggtggaggttgcagtgagctgagatcgcaccattgcactctagcctgggtgacagagcaagactccgtctcaaaaaaaaaaaaagaaaaaatgaggttatgggggtggagcccccatgatgggattagaagtgctcctagaagaagagtaagagatagagcgctcttgtgtgctctctctctctctctctctgtctgtacatgcatcaagagaggccacgtgaggactaaaccgggaagagggccctcactaagaatgccactgtgcaccctgatcctggacttccaccttccagaactatgaaaaataaatgtttcttgtttaagccaccccatctgtggtagtctgttttagcagcctgaatggactgaggcacttcccattttatagatgacagaactgatagggagattaagtgatttgctcaagatcatagaggtggaacttgactgagctgtgatctgaacccctttgaatctgggcctgttagtgtttcaaagacctaggacttcactgtcataaacatagtgtacacatcttaaaaggagtaaaaaggatttctgtgtacatttagcttaatagcattcaaagttggaatcaaatggtggttctgtatgcaaaactacttatttaaaaatcatctcttgcaggcacttaatagcataaattaaaggtagacctatagcattcagcccacgaaagaagggatgagttcatctcatacaagaagtagatgtgtagggatagctctatgtagatgtatataaaaatagcacatgattgcatataaaagcaaatactattcactaaccttataatttgtgatggataaccaatagttatctgcatgtaccccactctttttcctgggaatgttcctatttttcttttcatggttggcagtttgaataaatctcaacacagtaccaaaaaaaagtggttatttagtttagaactgcgaatattgacctggagaaaaagaaatttagaggtttggtctcagtcatcttgaacaagatgtatgaaatatatggcttaatcttggctaagactttgcactgaaaataagtccacctgttggatgacttctaattgaagaaaacatgtagtgttcagatctgcccagtacagaataagtagtgataaaaataaaagagcctcaaaatatttttatttcatgaagtcttttgttttgcaagtcaaacacagatgcaggcatgaatgtactttccttttatttatttgtagcacattttatgctatttttatgaagcaaagcaatgcaagttgatttgactatagacacaaagtaaaaggcaggccacatactttctagcaagaatgcacatatgtcctttagacccctatactactacaaccgattcaaataaaaacgttttaaatgaaaagtgaggctaaccactcaaaagtcgtgggcaacatatgacaggttacttctgtccaccaaatagcatatagaatatttgaaaaaattttctgaaaatgttttctgaaattgcctaacatgcccagtgagtggccccacgggatctgactttttactccataggatattatgaaatattattcttttcagttgctaagctgtttccaattttctccacgcacatttcagaagaccccttgctgagtataacttgaatagagggtttttacagatttttacaaagtctgaagactgaaaaacttcttgtttagctatgaaactcaacagccagaggactaacatttgaacattgtaacaaaacacatgatgtcttgttgttctgatagaaaacaaaactgcattatatggtttaatattcttatttataagaagaaattattagaaacatttaagtaaaggagaataatttgtatgttgttcctgttttgtgagaatgcagcttaaagcatccagtccttcatatagcagatggttatggagcggtaactatgcactattcatttatataacaaatatgtacggagagcctgctatgtgctggggattgttttagtcactggggttgaggaacaaataaggcaaaatccctgttctcaaggactcacatatggagaatttggtggttcactgggaagagcaaaaggtagaaggaaggatgaccaccaggtggttggttgggaaaaggtgaaacatgtttgtcatactacttgccaaagtagagaccacaaggaatagaaaagtttatgataaagaataatttggagatgtaaatttcctggcatatcagttggttgcaggtccctgaaattcaggagagaggcttgagctgcagagacaagagcttgggagttattcatgtatgtgttgggctaaaatcaaaggagtgaatgagctcatggagggggcatgtgaagtgcaaagcaaaaagtcaagaagaaagaggacaaatatctcagagcatttaaaagggcaggttgcaaaagcagttctgatgacaactgtcctcccttgggacccataggagttgtgggtaatgactcaacagactcatcttttaactacaacacggactaaggaatagacatcttctgctttagtacttttccttcctcgctcatgtttttcctctgtagtgttgactaggaaacaggccagcaacctgttgaattcagaattggaagggagttgcatgaattcaggaaaactgaaaaacagtgggattcattgtatttgataggaagatagaaaaggcatataaatattgtttagtctaaaaattaaattttctagtttaaagctcacgttaggttacaatgacaactgtcatctgctaaaatcaaggttcttatagtaataacaatgacaataatcatagctaacttttattgcacgcatgctggatgccaatgactgctaagtggtttacataccctgtctcatttaattttccttactacctaatagttacataattattatccttattttacagatgaagaaactagggctcatcatttcaggatattctctgacaagataaccttgatactcaatgtatttttgaatgagagaatgtataaaggtgctcttagcaatgaagaaaatagggtcattgaattaatccaacctttcacatggtaactgggagtttcattggaattagtgttgggagcaacagaataagtaggctaatcctaatgtttattggaggaaagaaaatagacttttggaaacgaagtctaatgagatagtgctttgtgttgctaatgttgtgtgtccatttcagcacttggcacatagtcagatggcttgtgttctgcctggcaggaagaactctggtgacttgtattcctactgggaatactgtgcccatttgcttcccagtttcccctccctcctgtatccatctctgttcctccttctcacctctcgttgccagtttatcacttcggtggtgtgatatggggttgtgtgtgtctttgttcatcttgtatctagtgcttaacattcccactatcttctgcttctgtcatggtccctaaagcaatatcaatggacattcctacaacctgcaatcataaaatatactacagtgcctctctttttttcggtctttaaatgtaatacagatacttttctttcattctgtgctatgccctttagaggtctaacagattgaacatgaaagactaaaatacttgagaaatttgatgcagggggcctggtcctatctaataatctcttttgtacagagcaaatagcattagatttaaaaatataaagaagcaaacaaaagcagttggatatttaacctaataagttgaggttgaatcccatttcaggggcgaagtcactgttgaatgtggtctgagccagtgttggaagtgtaagaaaaaggatggatgaaggattggggacggtgaatcaaagggctgaatgaaggatttcttggctggaagaatacagactggttacagaggaaatgaaagctgagaaaactagaggaggtctttgaagctgagatcccgggagtctgcatttgataagaacaatagagaagccacagtgggggcaggggtgacctggtcaaagctgtgggtgagagaaaacaatttttaccaattggtaaaattgagtgtgtactggttcgtatacgtgagttgtctattagatccatgtggttgcttgaaaaagcctggaggatgttacattggaaaataaaagagaaaaaactgtggttctgagatttttgagttttaacataaaaagtgacttttcctttaaagaaattaaatataatttctcttgttcaagggtaggtatttttttggatcctgccaattgaacttttaaaaatatgctttagttctaattttcatagtattctttctatagaaattttgtttgtaacattagttacaactaacaggtatttctctactttccattgtaatgaatgtggtatatacatgtcttccaacagtattttttttagttaacatgttatttttaacagtatgaaagtggcttcatttttattgactttttactaatatttataaagtgtcaacattattatgtgatagttgaagctgtctttttaaaagttgatgcacagaaataaaatgcctatgatctatattgaagaaatgaaaattttcttgtagctggatttagctataaattttaaaagcattctaagtgaacatatacaagtagaaaaagtcatctatatatattatatatttgaacaacattattctgtgtgctttaatattgtattggatcgttatataatcctttaaatattaagtgaaaaatttcctttactatgtaaatagaaaagttaaaaacagacaatgatactgtgatattaaagaaacagcttttattgtgtcctgacagagggcaagggtgtttacacggttttttgctaacaccatcagagagccctttgagttgcagaagttgtatacacaaaactttcatagttatcactcaatctctcattcattggtatagctttattttatgcccttttttcttccaaaaatcattcagtgaaaccaaagctgaggtgtgtgaaagcccaaggagaaatcaaatattggaagatcatagttgtttgcactaagcactgaatactctgaatgtgtcattgtgtaaacagaacagatgttgggagcaagttggtacaatgtaatgaacccaattccaatcatagatcatcctgttactctttagtgcctccaaggtagatgttcaaaagtaaacaaccaatttactactagggagcaacacaagtgttagggaaaatagagtactacatttagttcaattgagtatgtcaaattacaatttgaacagctcccttaaaattcagaggttgaaaattcttctacttccctttctcttagggaggaaacctcacgccaaacagatgcaaagtttagactctctcaaagcctctctagaggaagcttgaacactattcctttgccaacccgttccaatatgtcatacttcttaggaacaagaaatttatctctgcctcatattgcagcataggtatttcttcacattcatcctcagtggaaaggaaaaagcatttggtcaccttcctccatgagatctttctttatgtgtctgaagaatattatgacgattatgatcatgggaccaatgttatcaggaggtcctgacacaaaccagaaagacacatttttggaggtgttcttatttctggtagattattcctggttccaatatcatgctccccccctttttttttggagacagagtcttgctctttcacccaggatggagtgctgtggcacgatctcagctcacctccgtctcctggattcaagcaattctcaggcctcagcctcccgagtagctgggactacaggcatctgccaccacacggctaattttttgtattttagtagagacgaggtttcgccatgttgcccagggtgggtcttaaactcctgagcttaggcaatccgcctgcctctgcctcccaaaatgctaggattacagatgtgagccactgggcctggccccaacatcatgctctttgattctgactttaaggatgatctcttggagagataggttctaatgtaaaagtactacttggatagataagacatgttttcagttgtaatcagtaaattttgatggcagtatttacttatttctttaggttagaacacttttatcttttccatagtattttctgttttagtttttgcttcattgtatgtgtactactattttagttctcttcactgttattatttagccaagataattttgaattccaattctttgagtctcctcctgctttcttagagcttcttttttagattatcctaattgctactaagtaataaaataatcttgaggtcaagatttgtgtttattaaacactattttaagatgttagtcataatagcaacatttaagtctcattcttctgagttctttcattgtcacacagcttttctagtgcactggcgatagaaagcagaaagatgtgttgatttggaattatgtccatcatgtttcctctagctaaaaaatctgttaacttcttctggatcaggggtcagcaaactatagcctgtgagccaaagacagcctgcagcctgtttttctgaataaaatattgaaacacaaccacactcattctcttacatattgcctatggctgcttttgctccacattggtgtagttgaacagttgtaacagaaactgtatgcatcacaaagtctaacaatttactatctggccctttacagaaaatgtttgtcagtctctgttctaggttaactctgaattggacattagaaaatcgtagttccagttctacctctagtttctaattagctttatgacattggccaagtcatgtttactctccagcattggtttcctcatttctgggattggaagcaggactgtgtgattgattgccagtctcttctagctgtaaaattccagaaatctaatgaatcttattttacctaaaataatctaaagtagattttttttcttacagattaaattttcggtttgtgttaatcacttgtgagtatattagacatacatagaaatgtccatacatattcaaagatataaaaataatactaaagtttgtctacgtaagctctatatgtgccaagtataaaggcaggcacaatactgtatttcttttaatctttaaaataactctgcattgtgggtgtgtatgttcactttttaaagagtaaggtgttgagactcagagacagctggtaagaggcagagctggtgcttgaacccagttccattggtaaaaccccgtgccctttccactatagcaactgtctcctttcatgaggtacctctattttaattcagtcatttgaatatatggccacacctcacttctccagagattgctacccaaattactcagaatataagtaattattaaaaagcaaaaaaacaaaagtggttatgatctaaatagatgttcatttatgccattaaaaaaaaagattccctgaggccctcttttggagcttgttcacttttatttaaaaaaaaacattaaaaatttgcttttttgggtttcctagatctctgtaattactgggaaatagattggaaatgtggaggggtacagttactggtgcagggatatgggcactggtagagatcgggactgctgtgattacatcgtggagaagagcgacacactctaaatagcaagaaagtcttaggcaggttagcacggggacaaattcaccccaggagcctccacgcagggctgagaagtttttgctgttcaccaaaagtaccctggagcattaagaaagtggttaaaattaacacactacatttcagaaagtagagaacaggtttccctttaacagaattttaataaaatcatgaaagaatttacaactcttaagtagataagcttcagttgtttgaatgtttccctgcatgggatattttcttccttaaaaatgctgagtggatgaaatactgccaagtctaggttatttaagaaatctttccccagatgttcaactacttcttacttttctgttgtttgttactgtcttattcattattcacgttctgatgacaatgctctagaaataaataagcaattaacaatctgacttcttggcttcatctcttggcagatttttctccacacctaattaagtcttaagatttttccattatctctttttattccctatagctttgaagaaagttttattgttttctttctattcttctaatttttttcagagtagaagcccatttttcctctcagtttttaaaaactgccttaccctgatctatgcgtattatctactataaagttaatcctgtaaaagcaaaacttatttcttctattgtctttcggggaaaccttacagtgatctccagaatgaatcatgcccactctccacttttggcagctcttccttttatgtttctctcatgtactgaattcttggtttcttctttctgatgcacatttctttccttggtgatttcttaacccattacttctaattgactagtttgagtaatattttaacacctcatgtatttttgaggtaatattttatgcagtttgttttgaaaagacttgctaaaacttcttgtggaaactaagagatttgtaaacatttaagtaatttatctcttatccctctctgtgtggcagccaggggaggaaggattgtttccccaagcctgttgccatatacttccttaaaataaatgatgtcagccgggtgcagtggctcactcctgaaatcatagcactttgggaggccaaggagagtggactgtttgagcccaggagttcaagaccagcctgggcaacatggggaaaccctgtctctacaaaaaatacaaaaattaaccaggcatggtgatgcacacctgtagtcctaactacttgggaaactgaggcaggaggatcacttgagcctgggaggcagagtttgcagtgagtggagagtgtcccacttaactccaggctgggctacagagcatgatcctgtctcaaaataaaaataattaaatgatgtcaatatatatgacattatattatcatatatatcatgataatgtgtcatattatgactatattatgttaattatgactatattatgatgccggtttaataatgtcagtaataataaaaagatcaaattgattgaaagctcatttggtatcagatgctatgcttaattgttaacatatattatctcaattaatcttcactacagttctatgatgtaggtacagaattccaggaagatttcagctaataaattggctgcatttcaaagttatatttacaaattggttatttcagatatgaaagctgctttctcgtagtagcaatgttgtaggtacagccctaggctggactggattgctgaagtctgtcacgtttatagctaacgtgagtaaatgaatgcctttgtgggaaagtgctttcagagttctcattgtgatgtgaagaacccacccaccttcttcccagggaccttactctcataccaggggcttgaccttattttcagacctgctcaatgaatagatcaacaatgggaatgaaccctctccagattcaaattatgcaaatactaagctgccataacaatagagatcccaaaatagagtggcttaaataaaacttttttttctctgttaagcaagagatccaaggtgagcttttcagtttgccaagtcaggcttaccccatgaaattatccaaagacttgggctccatctatttcttgcttcaccaatccctagactatggtcttcacctgtgtggttgcagctggctgagccctgtatctgtgttccagcttgtggaatggtacagagaggaagtacatggcagcacgtctctttgaaggaggtgaagtagaagaatgacttgctcccattctgttggagagaccttagtaacatggctgcacctatcacaaagggaactgggaaatgtagtctttggctgggtacatggaggcatcttaaactccattactgtgaaaaacgcggggagtgcattctgatgacaaccggcagtccctgccacattatagtcatggctcccttgtctatagagtggctcctgcaggatggactttggtgggtgtggcaggagagatgtgggtggaagatgggtacagtgatcaaggggtcaggtttgaggggtactgggatgctgagacccctgccagtgggacttcttaggggacttctctcaagctttcatcccactaccctccttgacattctttgttcttcaaagtctgagggcagggctgccttcatgggtgggtgacttctgcaggggcacaggaccctactctcagaagggatcagcatttggtttaatgctctgttgtcactgccttaaaattcttaataactttatccttaaacttgcattttgcaggtaagtttgatgggtaatagatcatgcgtgtgagcagtggggatagactagatggtatagcgtgtgcatcaggggcacataggcagcatgcatgtgggataattagcctggctacccaaagcccatgcttgtgccacacctagttacaaacaggactgggaaatggagtcttcagctggtaattacagggcaacaaggtggccgggccagtgcctgggcacagattggcaacagcagaagcagcaggtatggtagcagcggccaaggacaagcggggaaggaggagctctataggggggcagcactggtacccctgtgaggccagcctggctgtttgtccccaaagtccgtctctgtggcatctacacaaatattaacgctttagcctgaaccttgggacagaaactgcttggcaacatcaggaagtagacgttattagtagattattacaaaataaagtcatacacatgaacattgcaataaagcatttatcaaggaattattagagctctttaaagattttagaatctttggatttaaatgctgaaacattgcaaaatgaatatccacaagcttagaaacaagttacatttcacattctcagtggaaaagaacgttattttcacgtgaacttcagatggaccaattattaatgaggaagataaaataaaatgaaaatttcccttgaagttgaaaatagagttatagaatgtataaacaggcacttaaaattatatacaaatcatgaggctactttcaatttcttgtacgatctccacaattttcagcaaatgtcagaagaaacatcaaaatgtcattgaataaatttacacttaaaattcagacttacacaaaactgactcatatgaagagttaagtctttgtattaaaattgttccatgagactcatcaactctagacatactaaaatttgtattttgaaataatttattgaaatttatcccaaatgttgtcatagcttctaaaatattcttaacagctccagtaacagttgcataagaagaaaaatccttgtcaaacttaaaagttaacaaaaattgcttgcaaccttgtctgtgtgtagagctactaatgccatttacagctattcagaatgaaaataattttgctacagtacaattttgatggcctaaaaaataaattttcaaaacattgagtaagaaaaaaaccttataatcaattgtgatgtcacattaataatgtattggtatttattttatttattatttttaaaggaaaaacatatttatattttagtatctttaaagcacttctggccaggtgcagtggttcatgcctgtaattctagtactttgagaggccgagatgggtgagtcgcttgagctcaggagtttgagactagcctgggcaacatggcaaaacccgtttttacaaaaaatacaaaaattagccaggtgtggtggtgggtgcctgtcgtcccagctacttggggactgaggtaggaagattgcttgagcctgggagatcgaggctgcagtgagccaagattgtgccactgcactcaagcatgggcgacagagggagaccttgtgtctaaataaataaataaataaataaataaataaataaataaagtactgcaaattatgtagccagccctggctgaaggatttatctatctgttcagctttctgcaactgcctctttgctgtcttttctatgtctgctgcagaacaatatgacatctcctaccttattttttgtcctgaaatatattgctcttttgaggtttcaaagagatttgggttgttaacgacaaatggaaagggagggaagtcaaggctaagctcctcgtcaggccattgccctcttctgtttcttgctcagcttttgcttcctgggaaagtcacaagcacttgtagctgatagctacaaaagcacagggaacacttggttgaaccaaggcctgatgtcagatttatttacattttagagtattattccccagtcttttgaacattctcattacaggagtaggatctaacagcagttctcctcccactgatcttgcatggccaagatggctgccaccttggctcctcgctgtaggagaaatgagcgaaataagaccagagccaaagatttcgactagagaaagattccaggctgcagcatttctgacaaaggcaataggagggaagaagagggcagtcagcaggtgggagagaaggcacacttgcttgagtcagccatttgcaggtggttgttggtatggaacccagaggcacataaaaaatgaataagatattaaggcacctgtggtagggagaataatgacccccccaaagatgtccatgtcctaaatcctgggacctgtaattaggttatgtggcaatggaaattgaagttgaagatggaaataagggtgctcctcatctgaccttcaaataggggaattctgaattatctcattaggctcaatgcagtcacaagcatctttaaaaaggtaggcagaagaggagagtcagagaaggagatgtgatgacagccctaagatcaaacaactgccatgttactggctttgaagacaaaggggatccatgtgccaagaaatgagggatgcctctagaagacagctttgccaacaccttgattttatcccagtgagacccctgttggacttttgacttccagcattgtgggagaataaatttctgtcgttttcagccacccaatttgtggcaaatttttatggcagcaataggaaactaatacggccctcttgagcattgatattaacagcatgaactctggagtcaaactgcttagattctgatatgtagctccaccacctattagctattttatggggaaagtaactggagctttagtttcatcctctagtcaacgaggttatcacctcttgaatgtgttctatggaaaaatgaaggtaaagtctttaagacatatactgtgaagagaaagcaccagataagtattagctttaaaaggatcatggatgcctggctcttagcatggcaaaggacttccctccactcttactcccttgtaatttactactcccctcttctttagcccctgctaaccccacactgacccctggtcctgtagggtcagtacatacccaggtatattctcaccagggccccattctttagatgccaccctttcctattttctcatctaaattctctaatgtcttttaaaaagtagaaataaagaagatgaatatattaagtgctatctgctgaggtattaatcactgataatggcttcatctcttaaggtcctgtagttttgccatgtccaggactgtgccttttgtggagagcctctggaaatcttggttagttgcaagatagaggagtccttaggaattggcttttaattgaggacttttggcttaagttaaacgagtgggattcacagtgaggaatttcagctgggaaatattttaagcagagagacctcccaggattccttcgaattataccacattttatgaagtttttggcctcctgttctgtctacttttaagcagtcttgaaatgactgtcacaaaattttcataggatagttgctgagaaaagttggtagttttcttttttttctcttcttttaagaatttattaagcctattataccacgcagtatgttttatacactaacatacaactccctaataagataaagcaaagataaaaaagtttatcttattagaaacaagatacaccaccacttattgtcttcaaacattattgcactttaactttcttaatttgacaaagcattcaagaaacatctgcagactagttttaacagacaaataacacctgtaagcagacatgactgtcctaaattgtttattaggtatgaattttacaaactttacttgtattagcggtaacggtggagctggagagtattgcgccttctccaagctgcccggcgagaaccacaaatagtgtggtggaacttatggccctttccaaggccacggctctttcggcctgcagatgtcagcccacgcatctccctgtgcttgtggactggtttggtgatccatggggtgtcaggatttcttctgatagctttatggaatggatcaatgaggataacctcaaaaaatttgtatgtggaatcttcaccaacccagtaagaattcaggactcccagagccccacagtggcgtccagctcgctcctccgcaacggactgaaggcttcgagcaaaattttagctggttaacaccatgatggacaggcttgccgtaagttgcacccttaggaactgggcgttttcggccaccacggctaacacaaatcctatgtataacgtaaccttgcttggccttgtagcccagttggcgcgctttatcaggccgggtggggcggggagccctgtgaagagcagagagctggcggtactgccagcagcggaccctcagaagaaagcgcgtgacatcagactgcttctttctccatagctcctggatatacttgtatgcacccatcttggcttacctgatggctgccgccagacggaaaggcaaaagttggtagttttcttgaaagtccatagagtagagcagtttagagcttatgataccaacaaatttcggaagaacttttctacagctgtgaagaatttcatttcaatctggataccacggtgagaaattctaacagggatttgtaatgagattatcttgtaatgagatcacctgctgaaaaatccattcagcatccacagaaatcacattatgtacaaattagtagtaaaaatgtataaaaagccatttgaaacaaaactggctgagtaaaaactgaatttctgaagttattgtttattataagaatgtaaaaagcaaattctaaaataaatgcacaaataacatagttattggtttatgaggattcatatttttgtgttggcatgtaaaatgcaaaatgatttttaaaagagctatgattttgttttaaaataaatactgaaaacacatgaaataggatggttttcaaatactgttacacacggggggcacttcacaaatattttacgggccgtgtgcttgaatttatgatgtggtctccctcttgtggtaggtgttaagaaaggtactggcttcaaagcagttaataaatttctttcccttttgctgaaatttgaatctggaaagcattttgagaggtcaggctacgtatttttcattttgactatggcttttgggaagcttgattattttaacaaaaatcaaccgattgatcaatctgtctcctccccctatggccacgtcgaaatcagttttgactattaggaaatctgacctagtttctctatcttgtggcctgtttttggtgtattgtggccagaatgtatctcttaattttggcagtagtattttccatctgctttagaaaggctctaggtgaatgcaaagtttatttagttcatgctctacacttgtcactcttctgggtccttcagccacagcaagaaaccaaacaggtaaaattcactgccctcacagagtttttgttctatcacaaatataagcatggtttatgaagacgtaaaccataaagactgacatgttagacttcacgtttgcaaaactttcatgtagctgaagaagctatagatttaaaagacaaatacaggaaacactgggagaaaataattgcaacacaaggagctctgataaaccagtcagggggaaaaaaagcagtagaaatgtgtgcaaacagtaggagtaggcataaactgtgaagggctttcacttaccttaagtaatcattggtagaagtgggatttcattatttcagatttactcagtcgcaatcacaagccaagtatgcccttcagaaaagatatctcttagctgaaatccactgggtcgccatgcctctcaccagttgaggggatcaggctgaattcttccctgtgtgtgcctcacagcgactacgtgctgagtatggctgccatcgtgtgatatggcttgggaactgcacgtgtcctacccttttgtcaagtggaaaaaaatgaaccttctctcagaagtatcacctgtattctgagttcagcccctcctcccacaccctccaccactgacatatcttcatgttatgaaacctctcggggttaagcatattcagttgatcgatagcgtgtttttagaggagactctgtatctgctcaaattgcagcaatgagagttcataggaataggagcacagtttttgacttcccgttatctgctcaatgcgttccctctttatggataaagtagaccattctctgcttgactcagggctaatcttaaggccagatattttctgtacatttcttcccctgtagtctctcctgaaacttcaacctctttgaacctcttaccccttattgccctggctcgttctgtctccttgattggatggctatagattgttcacaggggccatcattcctgtttaccagtataaaagaacatgtgagtcctgtgaagattctggaaacattttagcagtttttctcccctccctgctgagtgcttggatgttgtgtaaccaatcctctagacttagcaaattgggagctatgactctggaatgcgagttaattaaattgtgcttgtatttagttttacgcaaggttaatttttttttcccctgttaggtttagtctgtgtggctttgttatatgcaatcctggtaactagggatactgagagagattttatgtagtgtgctgtgaaaggcatgcggtagtagaaaagcggaggagcctgggagaaagaatccagagacctctgtgttccaccagcgtgtaaatcatttaacaggacacaaacgattaaacagtgaaaatcaactttcctgaagcaattgacttccttttctgtttatgagccaaagagaagttcgtattaaataattctgttcctagatgttgttgtattaatgcctgtgtgtgttgatcacttgagaccactttctcctccagttatctgggttgtttcaaagaacccaggtgcccctaccttccaagtctaagtagatatgctatatccataagtttgggggttaggacctcagcttaactgcaggttaaccctttaagcaaaaggcgtttttcaatagtttgagatggccatctttcagaggtgagttgtacacttcccagccttagtaaacagaacatactgggccttacctgatttggtgctcggcactttatgtccattactgattaatatactcagagacgatcccaaagtaggtgggattcaggtaaggaaactgaagctcagaaaagttaagtaattcgccaaagcagcgcagatagtgtaagtttaaataccaatctctgcttttctacaagattacctttattttcctatctcaggtcatgattgtgaatagtttcttttctggtctgtagattcagtattagtgtggatatcagggtgtttatgaactcatttcctcaccattaacttttttctcttaattatggtagtgttcagaatggaagttatctgattattctggggtagtttaagcatgaagggtcagatgttcagaagtagctaggttttcccaattctaccttgacccagtgaatatgtgctgtcactaccggctgctgcatgggagctggtgggtggggtttatgtggtgagtgaagggaatggagagtataggaggggctccagcggagtgctgacctagggcttcagaatcttggcatccaaccgctggttatccaatccggaagatagttgaggtcctacagtaccaatatcctgaagatcagtggatttttaaaaatgctaatgctgagaaatacctaatgtagatgacgggttgatgggtgcagcacaccaccatggcatgtgtatacctatgtaacaaacctgcacgttctgcacatgtatcccagaacttaaagtataataaaaaaaagaaaaaaaaagaatgctaatgctttgaaatagtcaagttatggtaatcaacaatagagagtaggtaggaaagtgatgcaatacattcttcatgggattggaagtgaatttttagacattagggtagaaccgtaatctgtttttgaaagatatttttcaaagttcttttcactgtaaatttgaaagaagtatgttttttttctatttctggttctcaggatacataatattgtaaagtcataggcaatttattttagcttttaaatagccaatacataaaatggactaaaagaaactgtgattaaaaataagtttggttagagttggaatgaagtccacaaattgttaacttgtaaaatgaaatttgttcaatttgtacagtatagcccaacgaataagaaaaataccatgggatggctcttcaaactgatgatttttctttgtttatgtttgtcctaagtctttccataaacgttgtgactgagttacacatttaaaaaaggtctagaaaaaatactaatatatatatagcttttcagatactaccatatgtatgcaagagactattttctttccaaataaaatttatctcctttatttttcttagatttatatgcaatcatttaactcttttatagaaaccatcctgtatttgtttaaaatttgtcagaagtagtttatatgttgttccattgctatcattttatgattcatagtgaataaatgcaaaatgtcacttgaaacagccttataattggaggaaagtctcaaaaatatattaaagtattattaaacacaatttttttaaagaaactaagtgtttatttcctaaaacaaattcggaaggtagcacctcccaagaaacctaaatgagaaattatctttgaatttagaaacatctgtctgtctcattgagaggcagatagataataagcaaaaaagtttaaaaattgcccatgttttttagaaatttgaaattatgttactgcacttctgttcaggaaatgataaataacagaatcatgatgtacatcttgttttccaacgatttaaaaaaaatgcttccaggtcatatttaggacttctccctcacccctccctcccgcccttccttccttccttccaaaattgaaatgtaattaagattctttagatttctgcttggccttcagtttctggcagtctctgatcataaagcttagcttcctgctttttactctgccttttaaaaaaaactttctactttttaaattagatttaaaatctactgggtaggattttttactgtgactgtacttgaaatgttgaatgatgacatggaaatgctttctaaattctatttacattctctctcctatcaaagtgccaccagttacagatctattctgttgtttcttgacaatgttttagaaaatgttatgatgactaatttttttttatagagtaatagctcttccatcatgctatcaggcaggcaataagtatacttagctcttatttttaggaatttaagctgaaggccagatggcaaagttttcattgaatcaaagcatagctttatttcaaaggaaaaaaatgaaccaatgagttgacttaatttcaggagttgtttgggattttctctgaacatttgtttgacagagacagtttctcactaattaaaagatatataaatgacaccaagggacgttgaatgaaagagttgtattgttgtcaaggggctgattttaccttgtctttgcagcaaggtgaagcctacagcccataaaagaagatgtcaccatgacattgccttttttagaatattgatgttaagagctccttaagtgcatttattcagcaggcatttaccaaccacctatcatatgctacttttcaccaaaaatgtgtaagttaaaaggtactaatggagacctttgcattctcagtagtgaaggaaacatcagtataatagcaccatctactaagaagacaaaacaaaaaaaagtgtgttttcatctctgcagcctccggaaagggaaagcagcattgaggagggaaggactgagcagagattgtgttgggtcacccaggttgagtggcatggagagaaatgtctggagggtggaggaggaagcagggggatgtaggatggccttcccattatatagcagagaccagtgctcacgtgcttgtagaagaggctggacctccaaaaggaatggctgtgtggggcagccaggaaagctggaccctggggaccatggccctgtaccctggcttggcacagacacaatggcgcgttctgtctagcactcacttgaggacttagaggccatgagcctctggcagttctctgaggaatgaaagctagaagtccttccttcgttcttccaggttccatgtaagccccttgcatccttgtaccatcctaaggagggagagatccctgcaaaatatgcctgaaagatctttctcatcagctttttgagtggggaagtatgaatttactttaagaaaatattgtggcttttcttgtaccctgatgtaacagcgttgaatccacacactgtacaccttcaagcagggctattctgagctcatttgtgggtccaggtgtcacttcttactctgagtcttcatgttctatacctttcctgagtccccctctacccctaaaagtcactcattctatgtttcatttctcaagtctaagtacaatgaaaagctaatgataacataaagctaaacagtctataattacattcagaactaagtgttcaactgaacagaaaatcttaagggtgaaggagttttcaaacttgtttttgacaacaaaagcccattttcaaagaaaattttccatggactcatgtgtataaagcagccaacagtagagctctttggttgaaatggagtaggaaactgaatacacccctttaatccatgatgtggccccaaagcccctttccttgctaacctagagttcttctaaaacctaccattttaacccaaagtgtgggtaatgtgggtgtcaggggtggaatgttagacacatcatcacaggccagtggggaagattattttccgcagaagggccatctgttgtcctactaagagcaaatgccactcataaaccagatgtgtctgcaggcttgagtgagcatcacactgtaacacaaagggatttttattcctgcatcagtagtttattctcctagcaatgtaaataataagttgtaagatattcattgccattgagagccaataaataggaacgatcatttattcatgctccatagacacctcatattctcagtcttcatttatttatccaacagatatctaacttgcacgtataatgtgtcagttctattctagactcagggtatagcagtaagaaaaactgataaaatgcctttcttcaaggaaattgcattctagaagggagagagagacaatcagcaaacggaaatcttctgtgaatataaattatgtgagctataataaaacagtttttttaaagaagactgcaattttgatggtcttgggcactggcactattaggagtggttagtgtagtgcctgccctgcatttaatagatgtctaagaagagagtgagaaggattgcttagcttggaacacagatacttctgaggaagccacatttaatgatgggattagagggacagaaagacatagattgaattcatttttagattgtaagtatattcttgatgtggatgatactctgttttcaaaagaaagtttgaaatttcccaagctcctagatattcaaggatggtcattgtttatttgacctgagccaacctatagtcagaagttagtactgtcagtcatatattgcctaacgatgggtatacattctaagaagtgtgttggtaggtgatttcatcatgtgcaaacatcagagtgtacttacacgaacctagatgtagagcctactacacgtccaggctatgcagtccagcctatggcttttaggctacaaacctatacagtatgttactgtactgaatactctaggcagttgtaatacaataagcatttgtgtatgtaaacatatctgcacatagaaaaggtacagtaaaaatttggtattgtaatcctatggggccactgttgtatatgtagtccattgttaagaaaaatgttgttacgtggtacatggcttgtacatccagcatccactcatgtctcagtacctccacagctactcaataaatagactcccagctgctatccctacttcttcccttgtccccctagagtctatttccaacacaataggcagagcaatcctttaagaatttcagtcagatcatgccactctttaccgaaaaccatgtaatgactcttgtgttaaagttacaaagtccttacaaaggcctgcagagccttgtgtgtttggaccctcccttctgcttggcctcattcttgtgcttggtccctgctcatgctactctagccacacaggtctttttgctgatcctgacacctgccgggcagactcttgccggaggaactttgcactagctcttccttgaatcttcctgagactccctcacctctttcaagttgttgctcaaatgtcaggtttgagtgaggcctgccctggcaccctaattaatattgggtgccaatattaataatattaatgttattaccccactcctataccctatacctcccttaccctgcagtactctcttcttcatagcatttattaacatcttgtgtgttatataagaattttaaaattatgcttattgatatagtttgtcattctagagtataagcttcccaaggcaagggagctattctgtattcaaaaatacataatacagaatagtattaattattctataataattaattattatagaatatacagaataatagttattctgtaataatacagaatgttaaagaaatgagtgcataaatcagagggcaacacaagccttgcagatggaggaaggcgtgtgttatatctccagttcctcatgaaataacttaaaatacgtcattagatatttctattttccaaaaaatggaaatactgtacttctaatggagactcagccaccttttcaaatttctctctcccccagcacagtgcccagcagcaccagctcccctttctcctcatgggaattctcactcctcttattttttattttcatttttattttattttattttttgagacagagtctccctctgttgcctaggctggagcacagtggcatgatcttggctcactgcaacctccgcctcccaggttcaagcgattgattctcttgcctcgcctcctgggtagctgagattacaggtacatgtctctatgcccagctaatttttgtatttttagtagagatggggtttcaccatgttggccaggctggtcttgaacccctgacctcaggcgatctgcccgcctcggccttccaaagtgctgggattacaggcatgcggcactgcacctggcccctcactccttttgtactcagagcttccagaccctcatccatacctactgaaaatatcttaatttcagcagaatgaagggccttccatctaatatgactcacctcctcagaaggcagggtaaagtccatgttgggttggttgagcacacccttagattttctctcccctttctcacctcttgtcttttaccccaatccttttaccaatctattgtgcctacagatacagtgctctccccaagaagtattcttgtatcagccgctgaaagattacactcagtctttttcatctaatgacataaccttgtaaaaggtaagggcaatagtggtttatagtacttgatttcgagcagcatggagaatggagcgctgacaggctctcagcacgggcccatgtgatgtgcagagctgtgtcagctttctcttccgaggtggagttgaaactgagcttttgactttcagcaaggactcaaagacagggcaagtaagggcaccatacagtccgtggcaggctggtggataatttttgaaaaggactctaaaagttaacaaccagaataataagagcatttgccaataatattgatacacagacagagagagcctaggaagctggaagcaattgcagaaaatctcaaggtgatttcaggctagggattattattttagcagtctgttgtcagagacaagaatgctgaaaagagctgatcatcctttgggtatgtactcttcaagatccatgtcattctgaagtccaggggatccataattgtccccatcatctggacatgtaaactagctttttaggcagtataacttcatatactgctatttttgcagtagtattaattaactgtcccatgtgtaatggaagtcagctttggcagtgaagtatctttacttggtaaaattatcttcatcagatgatgatcaatagaatatatgctctatttggggatttttttttgttttcttctctgctatattaccagaggctagaatagtactttgcacatagtagacactcagtaaatatatattcaatgaatgaacgaatgttccagttatcaatctgccattgatttaaattccaacatatacctcttagaattatagttagtggaaatagtttcaagattgtatagcatgacttctcatggaatctccctttgtcatcctaaggggccactcaaaagcctgttggaaaatgattgttataagacagtgatatttatggtagaaaaatctctacagaaacctgataagagctctctcagggtgttcaaaaaaagtagaactgacatggaatgtcatctcatctggatccaattcactgcaagacagacatttgtcttttgtttagagagaaaaagacaatgttgaagttttactcaaacctagtgcccttaaactggccgagtatcagccgactacactattgcacaagtaccaggaacaggggagtgggtgtggcatggaggattgggcctagatcatagaccttgggatttggggtgtttttcatctttccttaattatgtggctttggcccatttcaatgttgacctcatgatacttcatttccttcatttgtaaactaccaaataaaatatgtttgtagtactttaataattgaacagttttatacaagtaaagtggaaattctgaatacaggttaagaagaaatcaaacagaaagattttacaaaagttattctagttttataaaagtaatattaactaccaaaactgtgaactttcaaaaaagaacaagaatacagtaacaatttatgataccctaaaaccaaggacagccacacttccagatgaggaaccacacaaaagaagtcagtttctgctgaatcagccaagacaggggatatcaataatcaaaacaatgcaagctgtgctgggttttaaatttgatccagatttgagatgaccatatgcaagaaatggctttactggagtcaaatatgtagggtcttaaagataaaatctggaggttaggagctattgaatcttgagctttcagttccatttcctgaggaatcatcggagccataggtggggaatgcaataattcttgtgaggcattgcagctgctgaaatgcagacatatggaatttttgcactctctagtataatacagaaacaatctcacaataagataaaccctcctttaaaactttctcttaaacccagagagaggatattgtacagactggataggtaaaatcttagtattttggtttttcatttttagatctggttttctatgaatcgtttaggagtctgtatttgtaggtataggagtgcactcctgtgcggaatcttctgacaccatactaaacatgttggatattttggcagttgaaatccatagatgtaatttgtattgatactgaaattatggactataatggaaaactgggcttttgttgttgatattgtgaagatgttacatgaagtagtatcataagaaacttaccagatcaactaatgcttaatgttcaatgagttgaaatgctgatttccttgatagcattgggaaataattcattaattttgttttttttctgctttatggcaatatattgttctattagggatttaggtaactttttccattgaatcgagaacctcctgagtgccagccactggctgggtcccaggaacatgggtgggaaatatattaatcgagaacctcctgagtgccaggcactccgctgggtcctaggaacatgatgggaactataacagacatgggcttcattgactggagctttcagcctgtacttttctctatttctattgctgagttaaaatgttccatattcctggattccctgtaactagtcaacaaggttcatcttatcaaggaatacatactgcagggaatggtggcagtgaccaggcaactgaccacacagtcaacacacacacacacatacacaaacacacacacacacaagctttggtggaaggtgagagagagacagaaggagatttttgaaggttctacttaacttttttttatctgaaactagagctcataaaaaagttatttttttcccagctaaaaagataaaacatcatcattgtaagaaaatttgtaaaatgcagaatacaatacagtaaaaagtaaacttactttaatcctaataccaaagataatatacctctcccgatgccaaactgtattttgttttctaggaccagttggtgttttctcatctaaagtagcttgaactttgtcctaggacattaagtattttctacaatgtagttttcaatggctgtaacagtattcctcattatggtggtatcaaaatttatttaactagcccctgaatattgcatagtggttatttcatagtttcctcattttaaacaatgatggtatgaatatcattaaacataaaacataaattcataatgatttcctttttgtgaagtctaagaaataagatgattcctgagtcaaagattatgcacacttaaaaggcatttgatgcacattaccaaatattttttatcttaacatccactttgttgagctgatttatccttttattaatggtcttcctgaaaaattttgtatctttttgtcttaaatttattgtctactgtaattttgaagcagtggaatacttattgcattttgaagagaaaaagaacaccaaaatattaaaagcaaaaatataaaaatgtcactgtgttaaggaaaaataaatgaaaattttattagtgaatgccatttcccgttccttatgccaaaatagacgctgacattttaactggcattttcattaaggcaagtaaatacatttcaaatacagggcactgggtctctatgctatgttcaaacacacagtaaatggttatttactgactctgtttttactggaactttctctgtggtacatagagtagctttttagaaaggtagactttttaaatgttggttcaattagtagcactttacttggacataattttcaattatttagaaagatacacccattgggtattctccccacataaattgtgcaaatgatgaagctaccctcttgctctctgaacatggatgcctcactctgcaagcccactggtgaactatctcctgctttcctcagacaagcaatcactctttgtattatttccaggtaatttttcaattaatgtgctaggatgccaaagaaaaattgatgacaataaaactgagggaatttggaaacaaatctgttgaatagcaaaagaagattttctatgtatttattttttgtaatcttaaaagaaaaaaaacccatcttattctgacattatttcctgccctttttttttagtgctctgtggaaggggtgagaactttctgtgtgccagtggaatctgcatccccgggaaactgcaatgtaatggctacaacgactgtgacgactggagtgacgaggctcattgcagtatgtgacaagctgtttagggtttgtctgagtggacagggattctcaaatcctgacaatcatcagcatttgtgtagactgctttttgtttgcctttctaaagcgagcaaacgtgtttatcttcccccagaatgacagcagcatgtttgcacacctttcaaaggcatggtttattaggagctcaacaggtagaggctgcattggaacagatgagggattgcagcgtttttgcacaaagtggtttaaattgggagaaggctttggtttattttgattgggtgagaattttcatttttgtttatgagtataaaggtcaattttttttaaaaaaggacatttttatagcaacattttcaccctaatgattcttaactttcatgacacagtaaatacaaagcctcttgtttttttttttatgcttcttccaaacctggagatagtcaatggcactaactgtttaaaatccactaatcagtagattcagccttatgtgtcctcaatttattccccattgattgattagtcattttgactgaattggccagtggtttgtccaatatagattcagatttcaagttgttttgcacttacaaactggaaagaaggggaaaaccatcctgaagaagtacattgtaataaacaaagctagtgtcctatttgttcacccctagtaggttaaaaaaagaaaacaattacactgagtaatctgtattcaaaacagaagtatctccaattagaacactacatgcaagagttctaattgttctttaagggttatataaacagccacagttagtatggcaagagctgtgtttcactccttatgggaattgccaagatgtaataagtgcttgagaatactgatcttaatcaaaaaattcttctggtctgtttgccaaatggaccaactcatctttcatctgagttctaattgttctttaagggttatataaacagccacagttagtatggcaagagctgtgtttcactcctcatgggaattgccaagatgtaataagtgcttgagaatactgatcttaatcaaaaaattcttctggtctgtttgccaaatggaccaactcatctttcatctgatgggctaggacgctcctttgtcctgctgaatggcagaactactgaatggcagtttatcatggtaacatttcaggtcagtgtttcccaaactggtgtttcatgtagtatctgagtctggaataatgcttgaaaaaaaaaaactttgggaaatactatcaggtctacttcttagagggttagaatacacatttgtatattagaggttctgagaaattctgtagttttaaaaaaagacatttgcctaactttttatttcatcagaattatttctcatgtgaatcttcacctttatttattcatttattcatgcattttttattctgcctactatctagcatcccgtggaacttcaattatgccacgcatatttcaggaaacgttcttttcagtaagaaatttgtgttttacgacttggaattttcttttcaaaacaacgcatggcacacaattttacataaaaacatttttgtaggctgtgtatttacactgggaagtgttgctgtgggcttagcagaagatgctgtgcaaagcagccaaaatagggaactttaaataattcaatgtaacgatatccaatttatgggaatttggtagaatctctagctattctcccattgtggcccaagttatggtattgttcaaattctgcatatgcctgtatctcctgtggtgggccaactatggtttttatcatatgttcctcaatagtactgagcattgcactccaaaccctgtaagtgctttctgctgcatttgttaacattaaatttgaaggggctaattttccttgtcaacaacgtgttactgttttgcaaggcatttgccaatgtctgaggagctgaagcatttattaaggaaaatagatatggccctttcccatgaacatatcacaaaaatgatcttttggtccgttggggaaatacatcccttcagaaaacttctgtatgaaaacacagacattgaaggcttcttatgcaattgtttttgaccttacaaggacatctgcttttgagctttaaggttgaatgcttgtggtgtttcagcatgagtgtttatggagggtgccatactccttttgtcaccaccctgtggtgaaggaatagtgtaagtctgaattaggccttggatgtgaatcagagtgaatgcaacccacagatactcatgagaggagaaggaagttttgctgtgcgttctcagtgaggaacagaagaaaatgcctagttcctaaggttctcgcaagtaggcaagaaggaggactgtcagaggagattatgcttctatggattagatgcaaaaatgatctctagctaagcacttgcctgcttttataaaacatgggtcatattaggtggcctgtgtagttcattgagttattaatttcctttttagtcaggttcaaaggaagggagaaaagggacttattatttgtgagttacctcataaactatgctagaagcatttacctacatgctttgatttaattatcagcataggaagtgttatctaccaccttttgtacaggtgcagagacagagcttagggcaatgaataaatttgcccatgattcgctaaatttgaacccagtcttaaatggttcaaaatctaatgctttttctttcagctcgtctgcctttgacttgtccttgtccataaaaaagttcagatttagtgagattatactctgatcattcatattgcaggaaaatgttttaactgattttgatgtattacggctttcagaggtaattgtttattaaagagcactccaggtatctgtgactttctgactttctcccctaactggttttgtcttgtcaatctcttcttaagtatttgttggatgaaaagatttccaaacacctgaaacaattttagtggtgcagtagaaaaattttcaaaaaccaggaaaattttagaaatgtctacctctgtggctttaggcaggccacttctgtaaccctggctttcagtatcatcatggatggctgcatgctggcctcctcaggaagccccatctgcagagattttgattcagtttgtctgcagtggggaccaggcagcagtacttttgtaacgctctccaggtaattctaatggacggccagacttggaagcaccgggctagaaggtgcttggtgtctcttttgttgttaagattctataatcttttgagtctataactggctcctagaatagtgcctaggacatagcaagtgcttagtagatgaatacttcttaattttaaattagaaactcaaggaaaacgttttcacagtgaaatagctgccacaaagttcacacattttatgacacataaaaaccactatcaaatatttttgaaaatcattttctgtgaattttgggtaaaattggttgacttatttttgaggatggtggctatctaattacaccgagtgtaatacggtgtagtaatgactactataaattcttgagtcaggctgcttaggtttcgatcttaccatttcctgcctctgataacttaggcaagttactcaacctctctgtgcctcagtttcttcagtagtacaatggaaacaataaatagtgaatatctctcaaattgttcagaataatgattcactgaatataaagcatatagaccaatgtcttgcatgcagtaagtctcaaaaagcactaggatttgcggtcgtgactgttgttgtcactgttgttatcttattgttcctccactcccacccagcacctcttgttactaggtgcagagaatgaccactggaagtcgtggggacagctgataatgtcagctgatacatgtaaggaagagagaaacacaaaatatgcacaacaattttaaaagcagcaccacgtgaagctattttagaatggaggcagcctaaaaagcacaaaataaaaattgatattccaaatgatgtttgaatcatcaaaaatgactgtatctataataatctttctactaagatgtagctgcaagtaaatgctagaaatagtttcatcaaaattataaaaataaaaaaactctatgcttatggaagaagtactaaatgtttgcaaattttacttttttgtatagtggcaatctgattatactgaatcaatcaaagtattgaatattctttaattcctactatgtatgaatcatgttttagctacctagtaaatagaaagatactgttaagccatggtttctttctttatgagtcttttaatcaaatcagggaactaacgtatacacatagaaactattaaatatgttttttaaaatttttttttgagatggagtctcactctgtcacccaggctggagtgcagaggtgtgatctcagctcattgcagcctccactacccgagctcaagcaattctccaggctcagcctcctgagtaactggaactacaggcgtgagccaccacgccaggcctgatttttgtattttttgtagaaacaaggttttgccatgttgcccaggctggtctcaaactcctgagctcaaagtgatcagcctgccacagcttcccaaagtgctaggattaccggcgtgaaccactgtgcccagcctaaatatggtattttaaaacagtataacacaagcaatatcacaaagtcaaaaaaattgaggtaaacaagcaaacaaaaaaaggcagcagcagggagtccttctagtaaaaagagtaagattactagaagctggattgcgtagacagctgatggaaaagatgggattaaagctaggccttgcactcaggtgatgtttgtatactgtgcaacatgattttcaattctctaggtgacattttgcaatgcatggagacttttttttattgtcacaactgtgagagtggagggaggtgctactggcatctagtgggtagaggccagagatgctgctaaacaaactaccctgcacagggcagcccccaacaacaaagaattacccagtccaaaatgtcaaatgatactgccgttgagaaacccttttctagagctggaagccaatagtagaaagaactcagagagtcaagaagcctggttcttctcatggttctgctgtaaatgagctgagcaacagtggacagaccgtctaactcctctggtcatttcagaatcagaggattggatgaaataacctctggtcctttccatatttaatcttctgtgggtggaaactgagcatccgtacttgcatcttgagttgaggcaacacattcatgtttatagtcatagagactgtacagttgaaagaagcctttgagaaaaagcctttctgtgtgttagttttctgctctaatttaacaataattttgagagacaagaattaatagtgtgcgtatgagatgccaaactgaaatcaatattaacatgcaagaatttcagaagaaacattttgtatcaagctctccttaagaaaaaaaaaggtgtgtctagaaaaacatctaccttaggccatgcaaaattatgcttgttattgagcaagaaaatcacagcaagcagctttttcaaattttgatttgctggccccaaattgcactgacaacatctctttccaggtcaaataaacatttatttcagtaaaaggagacactgtgatctttgccatttgctactgtatttgcatttgccatttgtatttctggctttgcagtgcctctggttaaggttttgcgtgtttactaatcacacagaccttagggaagtaacagattgttttccaaatgcagctcattttgtatctcacttctaaaaatggcttctaaccaagcaagttataatagtagaaagttgaatccacacctgggagaacaatgaggatttttaaaaaatgcctgaatcctctccatttataaagtaatttaataaatgaggacatcaatttttaaaatatctccaatgcagtgttttagtatgaattaccaggggtcctagaatgggcctcatagaagacaaataaacttttggaaatttttggtgtgttcttaggttaatcagattctgaaaggggtatttgattccctagtagtcctactgtcaaaaaaagtgagtgtagtgcttacaaagaaattaactcctagggtttaaattgtgctgaaacactgtcccccatcctctgggcgaatgcatgcgtatactttgcactgatcgtcaagttgagaagccttatttcccgggctattgctgattctagcatgttgactcaaaacttcccacaagagtaatttagattaagacaaaaaaacatcaaaaagatcttttagaatttcacaaggtagtgtatatatcttgatgcacgaattccccagatctaccctgtgggcagaagaaccagtgtcataacctttccactcagctgtcacatgtgttgtagcctcattcagcagtgggggtgcagggtggggaaatagcgccctctgctgagtgggataaaataccgttgtcaaggtgatcgctaggacttcttagttcttatattttcccttatggtggctgtccttatttgaaaattattcaggctgggggaagtgaaaaataaaaagtacttacaaagttctgtatgcttataagtatggacttacgtgtatatatgcgtgtgtgtgtctgtgcacatacacaccttcctaatgaagacactgaacaggtgatttctaaggcccattccattcctaaaatgatgtgattctaaaaactttaagttgttttttttttagaagagtgcttttttgaaacagtaatttatgattcatgtatatgtaagtgtcatattttggcaagcctaatgttttaactgatcaatgccaaaggctttggataacgaatcgtcatctagtatgggatgtttacagtaaagtggtggctgctacttgtatgagatacaggcttctgcttgaggagaaacaatcagctggaattcaggagattgaaccactgactgcttgatttctggccttcatcagccaagtagactgatcttcaaacgtgccctatttttttgcctctttcctttgttcttgctatttcatctgcttgaaatatgctaaacttttcattacatccaccctattgaaattccgcctattttctgtattccttctccagccttaagcaaactgttttgcacttaatttactttaaataagggaaataaaaatatacttaagaaatctagtttctgtaaaatgcagatttctttacatatattgattttaaacatttttacagctttattgaggtataatttacatcctataaatttcatctattgatttttagtaaacttatagagttatgcgactaaccgcacaatacagttctagaatgtttgcatctcccccaaaatttatctcccacacatttgtagtcagtcaccaattctaatccctcagctactgtaactacttctcagatttctgtttctataaatttgttttttctgggaattccataaacgagtcatataatatgtaatttttgtatctgatttctttcacacagcgtaactttttggggttcatccatactgtcacatatattggtagtttcatccttttaatcaccgagtagtatttcactgcatgagtattacgttttgtttgtccattccagttagtgagtagttggatttttttccagtgtttggcttatgaataatgctgctgtgaacatctatatataaatcttcatgtggatatatgtttaatttatcttgggtagattcctaagagtggaattcacaaattaattgtatggtaaggttgcagttaccttcataagaaactgccagttttccaaggtggcattattattttagtctcaccagagatccatgagattcattttctcaaaatccttgccaatacttgctattatccatcttttccattgtagccattttaagggatgtgtagttatatcttcttgtggttttaatttgccttagcttatttttttttcttttgttttgtcctgccctctcacctcccgctgcctttgcttaatgactaataacgttgagcaccttttcatgtgtttttatgtctttcatgaagactttctattcaagtcttttgaccatttataattgaattctttttcgtctgattattgaatgtaagagttctatagagactctggatatccaaatttctttatcatacatataatttgcaaatattattctagtattgtcccaataccgtttgttgaaaagaacattctctttccattgaattgccttacacacactatttcattaaactcttctttcaaaccctattaagtggctgattttgtcccaatttcatacatcagttcacagactcctagacttgaactaacaataacacactaaaagtcccacagctagtagatggcagaaccaggataggagttctggtttacccaaggacaagactttattttcctattaaaatcaggaaaccatttgccctggatgttgtttatttcaacattaaactataagcatcctgagattacatagcacttctcatcttgccaccatagtctttggacagtacttgcttatttgaggattgcattatgaaacactcaattgacttaagcagtaatgtttatgtgaaaggaaataataactccataatctaaatgacttattttatttgttatgtttatgctttctactgacaaacctagacttcaactctaaagaaaacataagagttactaaagtctattctgcatgaacaagaacttcattaggaatgatggtgaactgagaatgtcttttctcatctttaacaatcaaggatcgttcaggtgacataaaatagaagtcagagaaacacatcagaaagtgataaaatcacttggcttgggagccactgttcaagtggccttgaacaggtcgttgtatctctgtgtgccaccttctcacctataaaacaataggtgtggaccaggttaccattagggtgtcccttccatgattggcttttgttaaatatcgtactacaatagcattctgtatggctctgatgacacactggtggcttcttttatttgcagactgcagcgagaatctgtttcactgtcacacaggcaagtgccttaattacagccttgtgtgtgatggatatgatgactgtggggatttgagtgatgagcaaaactgtggtaagtagcattgtttccccaaaggttttaatttaaaatcatagaaatttataaccaaaaacttacagttcattatgtgttaatatgattagcagtttaaattacaaaatgattggtttcttgttttttagaaggaggaagtttgttcagtcactgtcctcagtaatgtcttatgtgtaaatgtaatacctaaaaaatcatattaagaaaatgtttaagaagtgggatgggaagactggtaaaggttgttaatgcattaatagttttttttcctctcctcaaatgtgttctgtttctcctctggttagagccagtggcttacgttagatttgggcttttgagcaaactttgagggcagatatattgtctgtgcctgattcccttggtacatgtgactgaagtcccctcctttatttaatcctcaaatagtacagggaccacctgttcagcagctacacccagggttaggatgatgcatttgttttgtgtacacatggtgatcttatcttttaaagaataaccccactttttaaagagtcatgtccaattctgaatgccatctcatgaattaaaatcagcaaaattcctcttgctcatttacttttttggctttgtgactagcttcagaatttttaggtagcatattattgagtgacgtaggaactttgcaacatgaacaaaagggcaaactgggatgaggatacaccctggacaaatgatatcagacaatgtcctgcattagataacatcaaaatgaatgtttgggaaggatcagcggtatggtcagaggaaggcattggaatcatgaatgttaggaataaccccatgctgggaaacctggtggtttctaggagcgctgtctagctgccacttgctgtatctgtaaaaatattttaaaatgtatgtgtacaaaccattcctgtgtgactagatagaggtgggttattgcttttttctgataatagtttatttttattttattttgactaataatagttgtacatatttattgaatacagcatgatattttaatacatgtatacaatatgtaatgatcaaatcagggtaattagtgtatccatcacctcaaacatttatcatttctttgtattaggaacattcagaatcttctcatttagttatttgaaaatatgcaataaattatcattaactatagtcaccatccagtgctataaaaacctacaacttgttcctcctatctagctgtaattttgtatcagttaaacaatctctgtctctctctctcttttttttttttttttttttttgagatggagtcttgctccatcacccaggctggagtgcagtggcgctatcccggctcactgcaatctccgcctcccgggctcaagtgattctcctgcctcagcctcctgagtacttgggactacaggtgtgtgccaccacgctcagctaatttttgtatttttagtagagatggggtttcttcatgttggtcaggctggtctctaactcctgagctcatgatttgcctgcctcggcctcccaaagtgctgggattacaggcatgagccaccgcacctggcagcaatctctctttgtccctcctcctccatacccttctggcctctagtaaccactgttctactctctatttccatgagatcaactctgcatatgagtgagggcatgtggtatttctgtttctatgcctggcttatttcactaaacagaatgtcctccaggctcatccatgttgctacaaataacaggattttattcttttggcgtggctgaatagtattccattgtgtagatgtaccatattttcttctccactcattttttgatggcataaattgattccatatcatggttattgtgagtagtgctgcagtgaatgtgggggtgcagatgtctgtttgatatactgatttcctttcctttgggtatatgcccagtagtgggattgctgggttatatggaagttctatttgtagttttctcaagaacctccatattgttttccataatgactatactaatttacatttagatgtgggttatatcctgggactgactagtcttgagaaaaaggatgagaggaaattgtaattatatagatcacagaaattatagttgcaggaggccttggagatcatcagattcaacccttccctttaccagtgagataattaggaaatgcaggggattgaaaatgagtgagtgtcgtttggtagttggataggttagtggagagggccagcatgcaggtagcatgtgagaaaaaatggtcttaacaggcaacagaattcctctgaagatagcaggctatcatgaagtttgtgtgtctggatgccagttgtctccatctaatagcaataattatcactttccttcagaccagcctctgccctggctccctgtgctcttctggttcctgcccaagcacttcttatgcttttcttcttttctcaaacctatgtcctccctatactttcctctgttgatccaaaatatgctttaagatccatggtcactccggaagtctgtctatgaccatggcactgttactagactcatcatactttctcatggaatctattattcatgaatccacatacatcttctaaaacactgcttatattcagggtataccacctctcatggcaaagcatcctatggattctgccctttgtgagagcgaacttatcacttagttctttttcactaatatataaattgggacaaagttgaagtccaggctaaaaagaatcatgaatataacataaatattttgcatggcttacctagcagttcttttggatataaggccaggcatgctggcatattccttgtagtcccaactacttggaggctggggtgggaggatcacctgatcctaggaggttgaggctgcagtgagctatgatcacaccactgcactccagcctgggagaaagagagagaccttgtctcaaaaaaaagataatcaattaaaaacttaagcttagcatcaggagagatgacaaggagatacgtgccttcccaatttgccagacaggtaagttataattcctagaaacgtgagagagctgttacagatacatcaaatccgctagccgcattgtgaaacacaaatcacagttctgttttttgaaccagggtagaaatcataaatttttcataaggaaagaaaatgacaactaaagaaaacaaaagccaacaacaataagaacaaactacgggtcctggggcagctagagtagttacttatctgaaaaacagacccatcttaccccacagtgatggtggtcagtggggcacatgagtggggagggcgtggcattttaattgggccagacctattgtagaaatgttattgaaggtattggagccattggaacagactctcttcgatgggaactgggagccatagaatcctgcctgttagtcatgctggttctctgcatcctcgtgagttttcatttctccagattgcaatcccacaacagagcatcgctgcggggacgggcgctgcatcgccatggagtgggtgtgtgatggtgaccacgactgtgtggataagtctgacgaggtcaactgctgtgagtgctctgaggacgtttgttttgcttatttttccatttctggttctttaggctgtactcaaggttgaggactgtacttaagactcactatatacacagcattccaagggaaagattcttatgctttggttctagcctgtaaagatcactgagtcatgggatgacaatagcaatggagtgtatctgacttccacacctctccctgcaaaactccaagcttcatttggctgatctagccaagtgggtgtctgttttctctctcgttgctccatatgtctcttttatgcttctgtgactttgtcaaaggtgatgctctgcccacagaatggggaacctttcttctgcaaacaatacatgagtagttaagcttccctgcaggagtgccctaacatgttttcaggggccatttgtggaagaacatggaaagaatcgtcagagagaagagagcctttaatgttcatatgatgatacaaagagagcataataggccgggcatggtggctcacgcctgtagtcccagcactttgggaggcagagatgggtagatgacctgaggtcaggagtttgagaccagcctggccaacagtctctagtaaaaatacaaaaattagctgggtgtggtggcaggtgcctgtagtcccagctactcaggaggctgaggcaggagactggcatgaaccagggaggtggagattacactgagtcaagatcaagccattgccctccagcctgggtgacagggtgaaactccatctttaaaaaaaaaaaaagagagaacgtagtaataatataaatttataaactgttgtgtttctgtgtgaatgaaaatcttcagacagttgttatacttcaaactaataacaagtatggctattaacactttttccccctggaaaatatactatacccattagagaataatatacatgattgaatagaagctgtcaggtcttaagagagagtgcagttgacctgaaagagttaatgtgatatgttcttttgcatgtttgaattaattatacttttcatttcatctttttgtgtctagtaaaagtaagaaagttgattatatacatgagattgaatatttaattggcttataatttgaggcaaaaatagaaatgtggattacatagtttttattttgacataagaaaagtcatataaaaagtcacaatgcgtagctctcctcttccctgaaatggatttgaagtgggatgtcctccgagtccttgcctagtggacacagtggaacagagtggactgtatctcactagatcttggagaagcaaggacatggtgctcaggtagaacacttctggtgtggagtcttgactcaagaacagagaggtcataatattagtaattcagtgaaggctgaggtcacatgatccatgggtttccgatactctaaaagacaataggtatagaatttagagaaccgataggaattagaaggttaatggatattaggccatccctttcaaatatcagttgtcataaacaagtgttgaaataaagtgtttattatgtgttagttactatgcaagttctttcccatatactattttgttggcttatgaggtcaagtagataaataatgaaatattggggctgagagtccaaaaagcttgccttcacattctggctgtagctcttagccatgggactttgagcaagtactatgctctgtaaactttagtttctcatctgtaaaacaaagatgatagtatctactttacaagatttatatgagaatttgagattatatatacaatgcagttagcacagctcttgccatataatgaaccctttacaaattgtcatttttattagtaagtaggatcatgatacttccatcactaaaaacaatcacacagttctcaagaaaaagttaatcttggtaagtgctgttcaataaggcaggaaaaattctagaaataaaatcaatgatatgttcatttgtgtgtgcagaacaccttgtttcttagcgatgcttgataaatggctgttgcttatttgatgtgcagattgagagagaagaattaataaataaagtgaatattgttatggtccttcctagcctgtcacagccagggtctggtggaatgcagaaatggacaatgtatccccagcacgtttcaatgtgatggtgacgaggactgcaaggatgggagtgatgaggagaactgcagcgtcagtaagtgtgtcccaccaccccagaacattcctttactggtggtcctctccttgggaacaaaggaacacatttgaagttgcttaagtaggattcccatgtaaataatcccagattgcctaacatagtggtcctcacagccctagtcagccaggaaacactttcttgtgctaaacataattctcaagcaacttacactgaaaatcattcctcaggtgagacacctgaacagcatggtcagattcacttaactgttcgatggggaaagccgtgataaagagagaagtttagtgtatagcatccaattaaatcagattagattccagtgagaagaaattggcttctgaaaggaaatgtaatgtcttcctaaaataatcatgttcagagaagcagtttaatgcctcttattaccgagcaatacactttaaaaggatttgatatctgcgtgtgaatctcaaaaagaaaaactagatccaataaattgttttttaaatgtaactatttctgtcagaaaagaaagttctatgcagctccagtgtgtgtggaagcctctcagtagggtccagggaagaatatgcctagactcaaacatcacatttgtttatactacacgggcacagcctagttgttaataacatgattgttgcagccctgatacccaggatcaagcctcggtctgctacttactatatggtgacttttggcaagatacttacatcccttttaggtctcagtttgcgtgtctgtacactcagaatagtgataactacttcatagtgttggcatatggcaaaaactcaatatatgtgagcttttattacatggctactacattaaagcatatcttgggctgtgtatattcataatcagccaatgagactggtcacctatagataaattaggtttgtcgtaatgcatattgatcattagaataactttaatggaaaaatgcccaagacctaaagggagagcttttcagtcacagacttattacataaaaataatatataaagagtgctttgttttaccagtttttaaattcagaatgaaatcctttattaaacgtaatttattgtgtgcatatcaaccgagcacttccgtttgcatcaaactattctttctttctgtataattcaactctgaaataattttggatttttcatgatgaaatggcaggctttgtagattatttccttacatgtgtgagatgtaagaaagtcatatgataaaacagatttaaaagtaaaattttagtatttttatattgttcactttaatggattcaactcaaaaaatgtatattgtggtgtttatatgtggccatcccctgggaattcagtggtaagcaaaaccgctgatggagcttgcagactcctgggggacataggcatgctacgaattattaggcaagtcaatgcttaaccatgcagcaacagaggctaagaagggaaattcagggtgcttggatgcccttaatagggtgcatgccctggtaaagcgcctcagacaaagcttccctgaggaagagatactggagctcagacctgaaggatgagtggggttaaccaaaaagaacggggcttgaaaaagcaattgagacacaaggcaccgcttgaccaaaattcctgtggtgggaaggtgcaaggcatgtgtaggaggaccatgagagaaggcagaccattgtgattagagagctgagaacgaaagggggcctggtactaaatactacataattgtcagcatgggttgcaggtttgttctgctagacagagctggaaagggaagcaggggccacttctctggagactttgggtcttgctgaagagtcaggcctttgaaactcttcaggctctgtccctgcctatctgtctagcctctctcagcccctttctcagtggttgaagctccagttactttgacctgtgcacttccctattctaggcctttgcatgtgctgtttcttggcttgggaaacccatcctttcctcttaccatgacttggaaaagtcctttgagaaacttccccatactggtctcattggcttctactgctctttaaatgtattttagctgggcgtggtagcacatgcctgtaatcccagcactttgggtggccgaggcaggagaattacttgagaccaggagtttgagactagcctgggcaatatagcaagacccccatctctatgaaacaataaataagtaaaaataaatatgtcttccataaagcagtgatcacacagcatcagaaggttttgttcaggatgatacctctatcagagcacaagccacttcccagggggtattatgcccttttatgttttaatgctcagtgcctagcttgtcacatagattgtcacatggcatgcacttaatatttgccaaaataatgaatgcatgatgtcaataaaacctcctcaagagcctaaactcacagaaattgtttaggtttgctttgagaaaaaattttgaccctgctgacattaaaaaaagagtgacatctcttttctgcaaggctttgtgtattaatttgcacattagtggtactggaaaggataaatatttcagtataataaacatcatcttagaattataggtaagaatgattatacatacacacatactattatttatacttaaaagtgccttgcaaggttgactagattccagatgacatgcctgaaggtaattgatcgtaatgggggagagagtgaatgggcagtaatttattaccttctccatttaatctacaaatgaccagggaatcaaggaaaagcagtttcctctctacctaccttaaggaaaaatcattagggcaaacactgatactactgctgtcattcacttagaaacaagaaacccagttctcaagtcatcacagctaggctgatgacactttccaaggacatattgaaaatatggataacagctgcataacacttgtattatggtaaagtatccttattgtattggtgttgatgccctatttattactagagaaagcattttccttagagggagactagaattgggagcaaatgagtcttaaaaaagtgtcacttaatattcagaatttcaagatttttataacgttctctgtccctcaaatctcttgaattttattttgtaatcaagtgttggcacccatgtaaaaagaaaacactatttttttcccattaaatgcaacaaccacctgtttttagtgtagtttgtctcttatttcttcattcctattttggaatacctggattgtatttaattaccaggaaaatgaatccagaaagcacctattcaacgtacgttcaatacttttggagaaattggaaggaaattaaagttgtgttattcctcagctccatcagacattcctgatcttttagatccttaggtaaggaatttgtagatgatgaaagccaatgtgccttttcctccctctgtagttcagacttcatgtcaagaaggagaccaaagatgcctctacaatccctgccttgattcatgtggtggtagctctctctgtgacccgaacaacagtctgaataactgtagtaagtacaacagctgacaaatgcaatagccatgtcagggcatgcattcagcatttttcttctgcattgacattcaaatactgaagtctggaatccctccaaaaaagcctacctattttctttttctttttaaaaggtcgcatgtggtagcagtaaagaaaccaaatggtcttaattaacttcaatcagaaacaaatgtgtcattgcgaacgcctataagtccacattgcttaatatcattaccattactttcaactcagcattagttctctgtattattttcttggctccatctgtaggcagatgctatctttcttcctttttaaagcatagcttcaaaaatggaaactttaaccaagaagcaaatatgaagttcatagaaatagccacatacaactttggcaatctgttctgttttttttgagacacactctcactctgtcaccgaggctggagtgcagtggccccatcttggctcactgcaacctctgccttccaaattcaagtgattcttctgcctcagcctccacagtagctaggattacaggcgctaaacaccctcagtgatccatctgcctgggcctcccaaagtgctgggattataggcagtcggttcttttaatgaaatttattctcgcctttccaggaactctgatgacctgtaatggtttcggaaccattaggctaatttgtttcggtgacagtgtaacagctccaaacggtgtaagcaggtggctctaaaatgactttcaggaggaggagttatttggggaagacagaatgggcggaagtgaaagagcaccctatggactctcatggaaaatggaatcagaaaatccccagcgactgatttctagtaatgatttctgactcctgggctctgttttcatgttatactcgcttctttcactttttctaatgaactttttgctgcattttcaggttgggattagaaatttaaaagcaggtcagtcagttttcagttggcaagaggatattccttttttttttttttctgagacagagtctggctctgtcacccaggctggagtgcagtggcacgatatcggctcactgcaacctccgcctcccaggttcaagcgattctcctgcctcagcctcccaagtagctgggattataggcacacaccaccacacccagctaatttatttatttatttatttatttatttatttatttatttatttattttttggtaaagatggcgtttcaccatgttggtcaggcaggtctcaaactcctgacctcaagtaatccactggccttacaggcgcgagccactgcacccagccagggtattacttcttaacacatgtcctctcagtctaaggcccttggaagctgggatgctgaaagtcttcggccttgcatttgctgcagtttcgcggtcctaatttttctgggtcactgtagagcttatagtgagtacctctataactgttacagagtctcaagggggtgaaaaaaggaggctgggaagggggtgtaggcaggcagctaattaacccagactgacaggattgactgtggcatttaataactctttgcctggaagcacatgcccacccctcctccatttcccatatgagagaacagtagatattagtcaagccacaaagtcaacacactcaaactgccattttacttcctctaaactgatttaaatagaaactgatttaaatagaacatatctatagatatgcatatatatgtgtatatatgtgtgtatatatatacacacacacacacacgtataacatatttgggccactgtttccattgtttcattttactcgtctctcaatctgccgtggaaatttttcagagcgatttccttacttcaccttcaacttaaatagtgacagtgtcatctcaaagacatgtgtttactattaaagttttgggggttgtttgacatggaatgacacttactattagactcaaaaatgtagaaaaggcaatgttagcctgtgtcaaatttgggtaggaagtgactgggtgtatgttatcctattttctctatatttgaaatatttcgaattttaaatatttaaaatatgttgtctcctgtcaaaagaataaattgtaggaaaggcaactggataactcttggctcatagagctgaccaatatttgtagtgtgtacatgatgttccaagcatcgggatgggcgctgggctttctagtggtggagaaaggagacaggcttctagcttcttagaagtcacttttcagtgtgggagaacatattgtcatcttcccactgatatattctacactgttgttctctttaagctctttaaatacactcagtttacctagtgtctcactgtgtcaccagcttcctcattcatcatgtatattcttgccaacttctctccacatatattcagcaaacgtttgcacctgctctcttctgagtaaaagccactaggctagccacttgccctcattactcctgtgttattaaaaatggcacataggccgggcgcggtggctcacgcctgtaatcccagcactttgggaggccgaggcgggtggatcatgaggtcaggagattgagaccatcctggctaacatggtgatacccagtctgtactaaaaatacaaaaaaaaaaattagccgggcatggtggcgggcgcctgtagtcccagctactcaagaggctgaggcaggagaatggcatgaatccaggaggtggaggttgcagtgagctgagaccgtgccactgcactccagcctgggtgagagatcgagattccgtctcaataaaaaaataaataaataaaaaataaggcgtatgtgcctaacttgcagttgaaagtcaagatgttattcctgatctttcaaagaacttcaagatgatatatgcatacttaggtctctgtaaggacaaacaagtggcatctcagaaaatccttcatacatttgaaaatatggttcattacttgaagatgtttaccactatcaagagactagtattacttagcttctgaggcacaaatgaacagtaatttcttagtctgcttgatgccaaaggaaaatttgagtttggagaatgtagtagatattctgtctggtggagacagcctctcactggagttgccgggattcttgtccttgaagactctgattcttgccatcccataaaatattatgtgattttctaatggtcgctaaagatatattgggtgggacccagtcatcagtattttttaattctacagatgacttcaatgtatagccaaggttgagaatgtattgctctagtgcctatttatgactgggctgcaggggtatgtgagaactttgaaatagaatatgaaaaggtttgtgtattcccatgtgcatttttcagtggagaagcttattttaaattcacagaagtgcctacagcttttttaaaaagcctaaaaaccacatttcttatgatacatagttttttcaagaaatagcttttagcagcctgtgttgccatgtccagtcacaacccagcatctttaacatttctgtgccatgttgggaggcaaaatacagatgtgtccttgcctttgagggtaggagcaggaatgctattctcctcattccggtgtggagggactaatccatcacttctcccttgtggtatgcaatccagacaatggggagaacctgcaaaagcgactcctgggcatgtctctcctgcctccctgtgcccatgctgaccatggctgtgaaatccaggcatggctgtcatgtcccaggccctctctcaagcctcccacagtgttcgtcaacctttagttttacgcttactcgtgcattttcccctcttattcaacaccaaggaagaaatgaacaggtttgctttttgaataattccctaagggtctagcaatttcctactctctctttgcaagcttcagttggtaggagtaaacggtgtagtcatgtggtagagaagccaatcactataatggttacagacttctgtccttaggagcaaatagtagaagagaggaatgatgtatttacaaaagcatttccatgtgcattttctaataagtgaaaaaaagattgaatacaatattaccatttggtaacacgttgaattaatgaatgaagacatggagcatctacagctgctaacatcacaaaaagagggaaatcagaatgatgtggcttctggtgaaagaacagcttagccacttctagtcttgtgaatggaatgaagcccagcccactcttgttgattcagctgccgaggttcagaaatagaaagaatggggaacgtgtttaacttcaccaggagtgtgcgataagcaagattcaaaagctggtataccctacaagtcaaatgtctgggttcttctatagttaaattataaagaaaaacaaaagaatggaggaggaacccaaagactacgagagacttaaaagacaggacaagtttcaaaaaatgggcaagcctaaattacaatatccaggggtggtacacacttaggtaataaaattataaagaagccgggtgcggtggctcacgcctgtaatcccagcactttgggaggccgaggcgggcagatcacaaggtcaggaaattgagaccatcctggctaacatggtgaaaccccatctctactaaaaatacaaaaaaattagctggacgtggtggtgggcacctgtagtcccagctactcgggaagctgaggcaggagaatggtgcgaacccaggaggcagagcttgcagtgagcccagatcgtgccactgcactccagcctgggtgacagagcgagactctgtcacaaaaaaaaaaaaaagcatatatatatatatatagaagagcaaggaagtgagacagttgagataagacaagatatatggaaggtttctgcggtgtctgcctgagttcagtttcttgacctgggaggtagttataaggatgttcaccttaaaataatatcaaactattaaaaataataatgttaaagagggatttagagtttgaggcaaagatgaatttttgaatattattatatacgcagctagatgtagaaaagtcacatttttcatgtaaatgaccatcgcttaatacatgatttctagtaacttcagagtatcacatcataacgatataacaccattgagttaacgatcccatctttaggttgaattgaacgaatcttgttacagactttgaaaggtggaataccattgagattccatcaggatttttttctttgacagatctttattaaacctcatctgtgttcgggacactgtactgggtactacatcaaacttatatcggaagcacagttctgcagccctaaaatatcctcacgtttgtgatgcgatctccctctagtggcgatttttaaatcaggatcacacatgagcctaatgcttaagataaaaaagcttattgatatcataaatcatagaatttggggttgacaggtattttgagagtttatcttgcttagcattctgtgaagaatgcctttaaaggaataaaactcaagatccaataaaccttaccgaattcaataaagatctacagaataatatatgatcattacttaatcctttccttttccttggctcctaaacacttaaaagttatgtcttaacccaaatcaaaagtgatacattctccacatgtaaaaaagagaaaaattattcatgcgatatgttctgttaatcatcttcagtgaaatacatcaataaaaagttgaaccttgatggggtggtagaaagaaagaaacggagggtatgcacaaggaaagaaaggactgcatcagaaatatctgtaagtgaaccaattgtgtaaaattttaagtatattaaagatatcaggaaaaaagcatagagttagagctgcatgtgctgacttgtaagatggtcatgacaaataagcaacaaaagcaaattgaagggtgataggaatggtatgcttctgctttggcaaaagcaaacagaaatccctgtctaagtgtgcaaaggcatgtatggataaatgtgagcggggaaaggcatggaagcattcaaagccttctgttggcttgcagggaaggtaacagaaaggggagtggagagatgttgaactttttctttctgcatctttgtagtgtttttattgttatgaaaaacatgcatttttaaatcttgtaacaaaatatttaaatgttacttcttgtcttagttcagactgctataacaaatcattattgcttataaacaacatacatttatttctcacagttctggaagctggaaatctgagatgaggttgccatcatggtcaggttctggtgaggaccctctctgggctgcagatggctgacttttcactgtattctcacactgtgaaaagagagcgagagagatctgtgtggtcccttttataagggcactaatcccattcttgggggctgtacccttataactcaatcacctcccaaagcctccacctcctaataccaccacattggaggttaggatttcaacatatgaattttgggggaacacaaacatttagtccataatgtccaacccctccttcacaaatcacaggaaaggataaactgaaccgaccaaccccaaacctcttccgtctagtcttctctccactctgactcatcctcaagattatgccagcctttcagtgttgtgtcttcttcagcaaactgagagtcatattgcacttcatgcatcatttttttttaatcaggccaacatcagcctccttataaatataatatctgtgatatcctcggattctttcaattaagaagtagtcctggagatgttttaatatttcagcccagtccttattgcaaatctatttgcatggataccacttcttagtcaaataattaaatttaatttgaataatcactctcaataaggcatggagtctttggtctgcctgggcgaattttaccaggacacttgcttgcctgcctctccacacagggaatgtggcatatctactgcaaacagagagagggagctgggagcctctctgctgtattcccccaaagctgcccaaaccacatttatcattggaaggagtgttagtctgttttcacgctgctgataaagacatacctgagactgggcaatttacaaaagaaagaggtttaatggacttacagttccacatgactggggaggcctcacaatcatggtggaaggtaaaaggcacgtctcacatggtggcagacaagagaagaatgagagccaagtgaaaggtgaaaccccttataaaatcatcagattttgtgagacttattcactaccatgagaacagtatggggaaaactgccccattatcagtgatctcccactggctccctcccacaacaagtggggattatgggagctacaattcaagatgagatttgggtgggacacagccagaccatatcagagggcttcccagttcactcttgcactaccttttccctttggactctagcattttgttcaatatgtctgtcttagtatgttcaagctgctacaataaaatgccatggattgggtggcttaaatgacaaacatttatttctcacagttctgaaggctggaagtgcaggatcaggatgctggcagacttggtctctggtaacaggctgcttcctggtttgcagacagttgccctcttgcgtttcctcacatggctgagagagcgagagctttagtctcttctccttcttataaggactttaatcccatataaatgccaccctcatctagacctcattgaaacctcatcacctcccaaaggccccacctccaaatactatcacattgcaggttagagtttcagcgtatgaatggagatacacaaatgttcagttcatgcaaactctatcctaccctgttcacattctactacagctaccagcgcgtgcatcctttttcctatcgagattgtggagttcctcagtggcagagacaatatttctcattactcttacatttacattgcctaggatagtccctgatacattttcctcccttcattctggcactgtgctaggtgtagacttcaagatcaagagataaagtctcatttcacaaaaatctcaggattgtgtaggggaggcaagtaagtaaataaagaatatggcagaatgcaatgaacatatggtgggtatgtgcctaagacgctattgcactcacaaaagactcattctggaagtagtaatgggaagagtggttggccaggaaggtttcctggaagaggtatttgtgctgagtcttccagaccacagaggagttagcttgttggggaagatgggaaagggttaatccaggcagcaggtgccgtatggccctggcagctagaaccatgaccacctttggggagataattatgagcatgttataaaagaggaggtaagagaggagcaaacagggtgcataaagtcatacaattcttaaaatatctggtgtcataagggaatagaatttattacagcagagatactgttgattggataatcacaggcaatgaagctgaaaagttagcctagggttgaagtataaaatagcctcagacttcaagctaaggggtttggattttgtcttattagtgagaagtattcaacagatctgagcctcctcttgccctgaaatcttgtagccttatatttaaacacattaatcaacaataaaacatatagacagaagttatctacttgcctatttgatcaaattcattaattagtttagtgacagtgaagatgatggggctatcctattttagtagtaataagtaaatcagaagaagaagatgaattggagtcaataaaaggaatgatgaaagagagtcatctttagataagttgagccaagggaaaaaatgaggaaggactttctaaagcaagatgttgtcacagtgctagcaactacatatacagaaatgaatcttagttgccagggcacttcactaatcaacttacttattttcaatatccataaaaaatgttatatactactggcattctagtcttagctactctaaagaaagaataaaatagacttcaagtttgtaaaacttaaagaagttgtttttatatgtgaaatttaaaaatatttgtgtgtatgtttctttgttaggtcaatgtgaaccaattacattggaactctgcatgaatttgccctacaacagtacaagttatccaaattattttggccacaggactcaaaaggaagcatccatcagctgggagtcttctcttttccctgcacttgttcaaaccaactgttataaatacctcatgttcttttcttgcaccattttggtaccaaaatgtgatgtgaatacaggcgagcatatccctccttgcaggtaatatgatgggatctaccccagtcccttattttgcctcagagagaaccaaggggtgaagacttagttgagtttggacaacgtaaatttccctaaggagctctgcatttatcaaatactttatatttaacaagtgagacaaagaagtagaagttgtaaaatgaatatttgagtcagaattcattaacgaagtaccaaacaagggagctgtgaacgtcctttgatgatagtttatgtgttttaatcaaataaattcacaggtatttcattctgttgtattaaaaagccatttttttaaaaaagtatgatagtataaaagggatatatctgcctctttttctggcaacactgatgtgtttacaatgctgcactctgacagcacttgttagagatatgacataagaatacatagtgccagactcacagattggacagcgatggacattgctgacatttctctgcctgtttgaatgaaataagatgcgctatttcaagagcgtagcttggactttgaatatgagtgatattctagtgtcaagagtattgttccagagtccatgtttgggttaaaatcttgacccttctctagtttctaggtagcccttagacaaaatcctgagtctctctcagcctcggttcctttacatgtagaataaggatagtaatggttgttgggttgtattgttttgagatcaaatgaatgtaaagtgcttctgattcattgtaatgaaccctgaatggacaatagctatgatgatagcacaggaacacaatagcttcttggcagtctgtccctttgctgcgccatgtgttaggcattgtagtcagagggtttgcatatacaggatgactctcagaagtgagttgctactctcttcagtgctgttttccctcaaggggtaggtatacaaatgtgctggcctaaatgcgagtagcaactgcagaaaccatatgttgggatcagaagtcacgcagagttttttttaaaaagcagtactattactatagtggacagaagagaaaacaataaattatatgctgaataccaaatggataacaaagtaagggcatctatagagacaggacaggaaataataaaatttcaaaatgacttggggaactgaacaaattataccaatagagagaataaaactaaatgttagcttgtgtagaaaaatatctgaaaatttctgctaagtacttttaaaagtatctctaataaaacatctaccaattttatgttaaaaagctgttttaaatcttacttcacttttgcaaagcaaggtcagtgatagtgaataatttcttttaatagtacttaacaatttctggcatttgactttcttttcatatgtagataaaaatttccctgaagcagcattttctgctataaatataaatgtgaatttatatccagatgtaatttataatttcagggcttaagttccatattaaaatgcataagaccaaggatgatcctgaagtgttgttcaatcaaaattttggtaaatttcttttagataaatttatttctttttttcaggtttacccatacatctttcattttcagtgtctatcactacgaattttatattttgatatttgtttataagaaatttttgaataatatgctaataagttcataaagcaatacatagttgcttttgctaggtgtgtttattaattttaacattgaattttttagctatgagactgaaaaatctaacatcgagtccttacaatgggctaaatacttgaggattgttatgctgtagcgtactcaaaataaccttttgaagtgtgtatcatcagaggtgctacctatggctgaacactacaaggactatgataagaacagcgccccctggacttgtggtgctgcatattgttgtaatttccattttacagaaaaaaattggaagtggtagagtcaggcactatatagtcttttgtacaaataagtatcatatgactaatttaaaatagcagttgcaattgagttatatacattttttataaatctgcaacaaaactagttagttcaacagacagttatcaactattgaactttccatctttcctgacctaatatagaaataccatggctttatctttaccacaaattcctgggctaagccagtgttgagttatgctgagctttgtccagacttaaacctagacagaactttctccgaaatttcctcatttgattgttacactttctctaccagttttgggcaagactggagctggcctttctggaagatctgtctcccattttatcttaaaaatgagaacttagttgaattagtgtataaaatttgaaacttttgataagtaagagtttatttgagtccattaagagtatattggcctaggaacttactttggttagttttttttttaactgtgtaactaatttcttagtaatatattgagacaaaaatcatatttttttccataagaagtaaaaaaagaagtaaagaaatcttctgtgaggcacgctgatactttaacttaaaaatattctggagacaaaagacataatacgcacgaaagcacctgatacaataatatatcatttctttaaaacaaaaaccaaacattttaaccaactcgagctcaacgtaagtgggtttggaaggagtcctaagcttttcaccaatattgatggaagctgaagtaagggaggcatgccttaggcaagctaaggtggcacatgagatggctcacaaggctggtctgcagagggggagatctctgaggatgagggtgttgtatagattcaatgactttggtggcaaactatccaaagtgatgttggagacttccctgtttggaacaaaaggttggagaatatgtctccttcaaagacagaagacagaatgagaaaggcagtgtagagaagggaatctgtgtcctggaaacatctttagacctatttctgcaataaagtttcttttggtgaaagtgtggtgctggaatgtatactctttgcagagatattactcattttggtttcccaaatacctatcatatatatgtgcatcttttatatccacacacccacaatacatgccacatacacagaattaaaacttgacataaatttatgacatctgtctcagatggagctatttctgcttctaatgttttgtctttcttgttcatctagggcattgtgtgaacactctaaagaacgctgtgagtctgttcttgggattgtgggcctacagtggcctgaagacacagattgcagtcaatttccagaggaaaattcagacaatcaaacctgcctgatgcctgatgaatatgtggaaggttaattttaaaattaattacagcagggtatctaacatggatgaacatgttagctaccttttgaatttcttctatttatggcttcttgtttgtttgttttctatttagtttccaatcaggctgcttaggtgagtgaatttgtgaacttgattgcattgaagaatttggcactcatctgttagatattgcattcattttaaaaataaagaagtcattttctatttctattcttttatttttgtgggtacataggtgtatatatgtatggggtacctaaaatattttgatacaggcatacagtgcataataatcacatcaagtagatgagatatccatcaccccaagcatttatcctttctttatgttacaaacaatccagttatactcctttagttatctttaaatgtacaataaattattgttgactgtagtcactctgttgtgctatcaaatactagatcttattcattctatctaactatatttctgtaccaattaaccaaccctgctttcccccaccactacccttcgcagacactggcaaccattggtctactttctatcaccatgacttcaattgtgttaattttcagctcccacaaataagtgagaacataagaagtttgtatttctgtgcctggcttatttcaggtaacataatgacgtcttcttttatccttgttgttgcaaacgacaggatctcattcttttttaaggctgaataataatccattgcatatatgtaccacattttctttaaccattcatcttttgatggacacttaggttgcttccaaatcttggctattgtgaatagtgctgcaacaagcatgggagtgcagatatctcttctatatactggtttcctttcttttaggtatatacctagcagtgggattgctgggtcatgtattaggtctacttttagttttttgagaagcctctaaattgttctccctagtggttgtaccaatttgcattctcaccaatagtgggtgaggatccccttttctccacatccttgctagcatttgttattgtctgtcttttggatataagacattttaatttgggtgagatgatacctcattgtagttttgatttgcatttatctgatagtcagtgatgttgagcaccttttcatatacctgtttgtcattcgtatgtcttcttttgagatatgtttattcagctcttttgtccatttttaaatcagattattagttatttttgtatagagttgtttgagcattttatatattctggttattaatcccttatcatatggatattttgcaaatattttctcccattctgtgagttgtctcttcactttcctttgctttgcagaagctttttaactttatgtaatcgcatttgtccatttttgctttggttgtctgtgttcctgtgatattacataagaaatctttgtgcagtccagtgtactggaaagtttccccaatgttttcttctagtagtttcatagtttgaagtcataggtttaagtctttattcattttgatttgatttttgtatgtggtgagagataggggtctaatttcattcttctgcatatgaatatccagttttctcagcaccattcactgaagagactgtcctttccccagtgtgtgttcttgaaacctttgctgaaaatgagttcactgtagatgtatgagttcttttctcagttttctgttcccttagcctatgtgtctgtttttatgctggtaccattctgtttttgctattatagctctgtagtgtaatttgaagtcaggtaatgtgattcctctagttctttttgctcgggatagctttggctgttctgagtcttttgtgattccatatgaattttaggacttttttcccatttctgtgaagaatgtcattgggattatatttaatctatagattgctttacatagtgatatagtttggatatttgtccctgctcagatctcatgttgagatgtaatccccagtgttggagttggggcctgatgggaggtgtttggatcatgggggcagatcccttgtgattggtttgggtcatctccttgatgacaagtgagctcttgctctgcgttcacatgacatctggtcatttaaaagtgctgtagcatctcttcccctactctctctcttgctcctttaccatgtgatgtgcctacttcccttttgcttttcactgtgactgtaagcttcttggggccttcatagaagctgagcagatgtcttcaccatggttcctgtaaaggctgcagaaccatgagtcaattaaacctcttttctttataaattacccagtctcagatatttctttatagcaacacaagaacagcctgacacagaaaattggtactagatgttcagcattgctataaagatacctgaaaatgtggaagcaactttggaaccgggtaacaggcaggggttggaagagtttggagagctcagaagaagacaggaagatgagggaaagtttggaacttcttaaaaattggttaagtgattgtgacccaaaattccgatagtgatatggatagtgaaggccaggctgatgagatctcagatggaaatgtggaactaattgggaaccgggggaaaggttcacccatatcttgtgttagaaaagagtttggctgcattctgtttatgccctaaggatctgttgaagttggaacttcagagtgaaaatttagggtatctgatgaaagaaatttctaagcaacaaagtgttcaagagatagcctggctgcgtctaacagcctgtgctcagatacaggagcaaagaaataacttgaagttggaacttatagttaaaagggaagcagagcataaaagtgtggaaaatttgcagcctacctatgtggtaaagaaacaaaaagctttttcagtagaggaattcaagcaggctgaattgctggagaaatttgtataaccaaaagggagcaaagagctaagacaatgggaaaaatgccttgaaggcatttcagagatctcccaggcagcccctcccatcacagaccctaaggcctaggaggactgaatggttttatgggccaggcccaggtccccactgccctttgcagccttaggacactgctccctgcatccaggctgctctacctttagccatggctcagagaacatctgtcagagcagtgcagaggggaaacgtggggctggagcccccacacagagtccccaatgggtcactgtttcatggagctgtgggaagtaggcttctgccctccagactccagaatggtagatccactggcagcttgcaccctttgcctggaaaagctgttggcactcaacaacctgtgaaagtagccatggggactgaaccctggaaagccacaggggcagagctgcccaaggccttaggagcccacccctgtaccagtgtgccctgtatgcaggatatggagtccaaggagattattttggagctttaagatttaatgactgccctgctgggttttgggcttgcatggggcctgtagcctctttcttttagccaatttctcccttttgaaataagaatgtttacccaatgcctgtacagccattgtatcttggaagtaaataccttcttttgattttacaggctcataggtagaaggaacttatttggatttgggataaggctttgaatttgggacttgggacttttgagttaatgctggaattagtgaagactttgggggagcaactgagaagagatattgtattttgaaatgtgagaaagacatgagatttgggaaggggcagagcagaatgaggtagtttggatatttttccccacccaaatctcatgttgagatgtaatcctagtgttggaggtggggtctggtgggaggtgtttggattatgggggcagatccttcataaatggcttgaaccatctctcactctgagttcacaggagatctggtcatggtgcctccttccaactctctctctctcttgttcctgcttttgccatgtgacgtgcctgctcccccttcaccttctgccatgattgtaagcttcgtgaggcctccctagaaaccaagcagactctaggcctcctttaaagcctgcagaaccatgagccaaataaacctctttataaattatgcactatcaggtatttctttttcttttttttttttttttttggagacggagtttcgctctgtcgcccaggctggagtgcagtggcgtgatctccgctcactgcaagctccacctcatgggttctcgccattctcctgcctcagcctcccgagtagctgggactataggtgctcgccatcatgcctggctaattttttttgtatttttagtagagatggggttttactgtgttagccaggatggtcttgatctcctgacctcatgatccacccaccttggcctcccaaagtgctgggattacaggcatgagccaccacgcctggctggtatcaggtatttctttatagcagtgcaagaatggcctaatacacataatatggaaagtttaacaatattgattcttccaatccatgaacatggattatctttccattctttatatcctctttaatttgtttcatcagtgttttatggttttcatcacagagacctttcatttctttgattaagttaatttccaggtattttattttatttgtggcttttgtaaatgaggttactttcttggtttctctttcacattttttgttgttggcatatagaaatgctactaatttttgtatgttgattttgtatcttgcaactttactgaatttgtttatcagttctgtagctttttggcggagtttttaagtttttccaaacataagatcatatcatttgcaatcaagaataatttgacttcttcatttccaatttggatggcctttatttctttctcttttatgactgcttcagctaggacttctatcactatgttgaataacagtggtgagagtgggtatccttgtcatgttccagatcttggagataaggctttcagtttttccccatttagtttgatactaactgtgggtctgtgaaatatggcttttattttgctgagctatgttccttcttacccagttttttgagggattttttttcaggaagggatgttgaattttatcaaatgcatcaactgaaatgatcatatgatttttgtccttcattctgttgttatgatgtatcacattgattgatttgcatatgttacatcactcctgtaaatcctaaatggtcaccgggagcggtggctcatgcctgtcttgccaggactttgggaggctgaggtgggtggatcacctgaggttgggagttcaagaccagccttgccaacatggtgaaaacctgtctctactaaaaatataaaaattagctgggcatggtggcaggcgcctgtaatcccagctacttggaaggctgaggcatgagaatcactcgaacctgggaagtggaggctgcagtgagccaagatcatgccattgcactccagcctgggcgacaagggagaaactccatctcaaaaaaaaaaaaaaaaaaaatcctaaatggtcatgatgaatgaccttttaatgtgttgttgaattcagtttgctggtattttcttgaggacttttatgtcaatgttcatcaaggaaattggtgtgtagttttcttttttttgatgtgtctttgtctagctttggtttcagggtaatactggctttgtagaatgaatttggatgtattccttcctcctctattgtttggagtagtttgagcagaattggtactagttcttctttaaatatttggcaaagttcagcagtgaaaccactgggcaccaggcttttttttttttttttctgctgaaagacttttaagtattacttaaatagcattacttgttattgttctgttcagattttggatttctttatggttcaatcttagtaggttgtatatttctaagaatatattcatctctcataggctttccaatttattggtatatagttgctcatagtagactctgatgatcctttgaatttctgcagtattggcgcccaagccacaagtcaaagttcttctcactcttcctctttccacagagaggtaatggaagagtgctagtggtttttcctcatgatcactaccaccccaggtctatgacaagtactaccaaaccacaagtgttcactcaaggcccaagggttcttcagtcagtctgtggtgaatgctgccaggcctgggactctcacttcaggacagggggctcccctctgactcagggcacatccagaaatgtcatccaagagccagggcttagaattagagaccccaagaattcacttgatgttctaccccgctgtggccaagcctggtacctaagctgcaagacaaaatcccttttactcttccctctcctgttctcaagcaggagtttctccctgtagccatcacagctgggaatgtgctgagttacacctgaagccagcccatctcagagtctcaccgaaggctcatgagaagtactgcctgagtactgctactgattattcagggcccaagggctctttagtcagctggtaactaatgctgccagggctgggcccttttcttcaaggcagtgggttcccttttggttgaagatatgtctagaaatgtctggaagctagggcctggaatgggggccttaggacaggactctgtctggtgccctattctactgtggctaagctgatatccaagttgcaagacaaaatcctctttactctcccctctcctgtcctcaagcagaagaaaggagtctctttctgagctgtgagctgtgcctgcctggggttggggaaggggtggcacaagcactctcttggccactctgcggcatgcactaggttgcatgcccccaagtccactgtctccaagcccagcacagcatcaggacttgcccaagaattgcagtccttgtgagctagactgcctttcaagtttattaaggaccccaaaacactttagcctgtggtggtaaggcttgccagaacttaaattctgaccactgggatgggtgattcccctttggctggggttcatctaaatgctccctccatgcatgggcactggctgagctctgcctggtgttgctttctgctgtgataggacagcactgagttccaatgcaaagtcccacaatcactccacaagtgcacagattctctgtgctatgcagctcttgctggggaatgggggaggggtggtgttggtgattcaagactgtctttcctacccttgtcagtgcctttttcagtgatctgaatttaaaaccaggtactatgattgcttatatgatttttagttcttatgaaggtgcttttttgtgtggatgctgttcaggttggtgttcctgcagaaaggacaattagtggaggcttctatttggccatcttgctccatcttccccccaaaaaatcattttaaaattaaaaataatgaactcagagatgagtttaattagtactccaggtgttttttaaactgtactttactcacagagcccattatgtatggatgcttttatactagtgatcctgaaggcaaaggtgaacatcaaaccttggttccttcaagtaaaaaacatttggggaccatggcaacataggatcattaagtacagaaatggaattgtggactaggtggaaagatggggatgtgaaaatgattttgacacattgagagccgctaggtagtcaggagcactgactgcacaaggcatatcaggctctggcaattgttgggttgtcccatttggaaagaaaattaatcattggaatacatagatgttaaaccgcgtatctagagggatgaggccaagaatgaaggagaaagatgctgattggcaggcagaagaatgccaaagcaaaatggctatttcgttttgcaagagaccacccttatcttcagtaaaagctccttgacaacatcctacatgtaaatacataaattagctgatgtttctgggttttcagccctttaacagtaatattgtttttaatagaatgctcacctagtcatttcaagtgccgctcaggacagtgtgttctggcttccagaagatgtgatggccaggccgactgtgacgatgacagtgatgaggaaaactgtggtatgtatgtgcaatggtacttttcttgaatgtacagtgataactagaataaaataagaaactgtgttaaaaatggaaactattcactgatagtaggactaggattcaatgctaatgtctttacttcttaaattattgaacagtatggcatatattttaagtgtttttcctgactcttgatttcctctaaattgcacttctatataaccctgatacatacagtacccctcccccttatccgtagggatatgttccaggacccccagtggatacctgaaaccatagattgtatggaaccccatatatgcagtactatgctttttcctacacatatgtacctatgatagagtttaatttataaattaggcacaatgagagattaacaacaataataaaatggatcaattataacaatgtactgaaagaaaagtaatgagaatgcggtttctctctctctgtctcaaaatatcttattgtattgtgccaacatttttggaccatgcttaaccagggataactgaaactgtggaaactgaaacttcagataagggtggaggggcactactatatttgcaaacacttattaaaaggagaagcacctcacaaatgtaaagaattatttttattattaaattataaagccattgttatcagttttaaagccagaataatagtgtctttgcgtatgcttcccatgttgctaaatagacatctagatgcatgaaggcagagttcatactccaacattcagagttcagactccatcattcccagtctaattgggattcattttcatgtcctctcatattttttctctttcggcaaaggataaaactcttcttgacatttctgccattgagttccaaaatcgccagtggaaaagccataaatgccaatggtaatttgagtggacttagttgtcattatatttccctgcaaatctttgtacttgtaaccacaatgtattagggaatagaagtcagacaatggtctttaataaacagtgtttttgaggaaagcaaaatgattgaagatctatccacagaattgtttggttatgattatttagcctttcctgtttaagaagaattgacactttcatgacaagcacgtaaggcagtacatcttttgaaataatttcattcttttggcctttgaagtatgaaatattgcgttgctccattaagtgaattttaggtggtaaacattgcccttctgatctagacaaaaatgtcacaagcaatcaactgaaatcctgtcagctcctataaatatggactaatgcatcttctggaaaacttcagctgtcagaatgatggtacaatgtctggggtaattttgttatggaggaatgtacagtgtttttagaagctactgttgtttgcttgtttgtggttttttgttttgtaaagaaataaatcaaaattcattgaatataccttatataagtgatttattgagaatgtattagatttgttcactgaactatgactttgatgggtcatggtatttgagatgcaatttaaaatagattatcttagatggttcaaagaggttgcatgatactttgttggggtggctagacctaaatttgttgtaggggactaaatatttgagaaatacaaaagcttagttaaaaacaaaacaaaacaactttaccaagactaaaagttctgagttctagaacatattctgcaaaaaataaacttaaagtactatcatattggtatagggtttaaacgaccctaaaatatcaggtttctagttaagtaattggttttcaccagtattttaatcacacaattaaaggcacatcaaaataatagaatatattgtctaatctctatcaaaaattaaaaataattgacagcactattgagagctctagttaaggaaagttaaaagtgggtaagaaataatacatttggagttcaattaattgctccagcagtactaatttatgagaagttttccaaagtgactaacaatagaaaactttacatacttcgttcccctttgatacttctgcatgcatttgaatgggcttgttcagtgatttgggaggacacaccacttcaaatcaaataaggaagtcaggttgatgaaggctcaacagaggactaataggaagtcatctgtttccatttgcctccttgctgtttgtctttctgttttcgtatgtgcataggcacaccatctggtaatgcaagcaccagctccagcaaagctgggtttcaccccaagcttcttgcctttctgacttattctgtccgttgtgttattaagtgtttgagctttactgaataattggacaattaactattcattgtcatgaatctgcagctccctcagaatttctaacaaggttattgagtttccactcaaaacaatacttatttaactcagttatgaaataaatattgtgtgagaaattacttcttgtttctttggcacttttgtaatggagaaacatgataaccaaagcacttaacttataaatacacttttaaaatatatgcattagaatttagcaatcagtaatactgttcttaaatgtctccagctcttgtggtagatttttgctgttgaggctgctttgattgtgtaattgccaatgtaaacaagagttgaaaatgtcagtactagaaaagttttcagcaagtgttgggatgaattgtgcaaatccgatatgggaaggaagtctaagagacaggggaatgctgagcagaatctgcactgtgtcagtacagaagtactgcattgtcttaaggatgcttaagatgtcaattactgtatgcttaagtaattgagcatacatgatatagatggagctgcctgtaaaactagcaacttgataaatgagtttattttcaacgtaacattttccaagcattgatagccatgcagtggagcatgagggaaagacatgggaaaataaatgatcaagaatgacatcaaagaaaggagagctaaggaaaacaacaaagggattgtatgtttcagctgttctatcactctatagatttgagtgtgtgaggctgaggttatctcttgctaggctttacctccacgatttgggtcagctacaagagcaggtggtacctgggctgtgatgcaagcaagcagcaactcccagtggagcagtcacatgaaaatatagctacaacaggtgctttatatcgactgtcaaaataaaatcctttattacatgaacacagaatcaaaattactaattgatcactattctaagtaaaatggtatacatcatatggagaaaagattgacagcaatgcaaatgtctgagtgtcattaagtgactttctgtttatcttcagatgaccaaaaatcagttcttcacctatctttggtctcctcttgatcttaaataaaataaaacctttaaatataacctgagccatttcttcaagtcagaatccccttaggttgtattagaagatctgactctgatatttacgggttttacagcttgatttcaaagagtttccaaaaggcatgttttctttttggattcttggatagcatttctatgagttatctcacagaagggcttaactggctttcttaacactccaaatactaccagtctctatgcttttgtgtctctttgtctggggaggagaccactctttgctctgtagctagcagaagagtgagagtcattatgtccatagctttggcatatccacaaatgtgctttcaggaggaattttcaggattgatttctcatcactcagtagggtttaattttccatgttaagggggaaattttctccttccctttaaatacttggttaactgtttcatcgtcttctgtggtgtcttgggaaggcaggctggaatggcagagtgtcctgcgtagacttagacttgaatttacatccttacttagccttagaggctgtgtgacgtttggccagtcagtttacttctctgggtaagatgcagagaacacccacattatctctcacagcttggaatgcttataacatgccctgttcatcctcagaagctaataactgggaactcacctgctgtggtggtggaaaatcaggaggcgattcctttcaaaggctgccccagccatctcccttgagggaaggagtcctgtctagcatagtcttgtttctgacagctgtttatggcaaaagagagtgggctggtctgtcaggctaaagcatgggctgggggaggtctctggctcacatagtaaactcaggtagatggatggtgtcttttcctggagatagtgttggttttgggttggatgttctctctttttaggattagagccatgcagtttaaagtcccatccattccttcatcctgcctctttcacgggagactgggccacccatatgtgaagagcatgccataacaatggcactgctaagagtgggaagtgactcaggaattgggtaggctgctgcgactttccagctggatggtggctggatggcctgtgctggtatggctgccctgataatcaggcctagaccacagtgggaagcaggtcctctgttccagctgctatagcaggtgcagaggcagagccctttgcagccatgctttgagggaaggggctttgttgtccaggatcctgcatgctgtagaaggctcttcacacctgttaggcctgtactctggctgctacagctccttataggtcacatccacagccacttcctggggcagacactggtccaggatggctggatccagactgttccagcctttgtcagctcaataatgcagtattaccttgtctccttcctccttgtgagcggctccactccaaagggtgagaatttaaaaatttcatgcagctcaactcaagaggatgagtggacctacttactctatagctgcatagctaagagattcttacagaacaaaaagcatctgctttgaggtgatttgctgactttatttgtaatgacaactgtttttatagagaaacaaggtattccatttgggggtgggggggtactgcctctgtcagggcagcctgtttcacagagtttttgtgaaaatgagagatagagtaagcaaaaaacccagatgaatgcttagcacacttagtgtgaccagtcaaccagatctgcctgggactgatggggatcttttggaacaagggacactttgtgctcaaatcaattaaatccctggcaaactggggtgagttggtgacttttttggaacactgtatcctcaattattggttgttgctattgtctctgtgctggagaggttattattctgacatcaacaattatttggtttcataacctacaggtgcattaaacagcccatcccatccatgcctgtttttaatttttgatggaatcatatccttttccttttagaatatacatttaaaacataattgcaccaaaatgtcactttacaaagaaagtggtttcttcttaaaataatactatctcccatgtaactaatatctctctctttttatcctacttcttttgtgctcactgtaactccacaaaggaggtattatgctatgcaaacttttatgagaaaagagaagacatggagaggtgaaaagtgaatgcttatggagtattcctttaatgtttatagcaaccctatgaagcaggcattattatttgtatttaagatgtatggaaaccaaagtttggagaagttaagtaacttacccaagctcacacagctagtgagatttggaactaggattcaaatccagttgtctgactctaaagctgtgcttccactgctcctaccccttacgcatacttcatgttcgcatcttacaaaggactgcaactgatgacttgtacctggatcccatccagatctttctccgtagagctgtgatgtggagggattcaatttctctaaatgttagtttcctcacttataaaatggtgagcataatactgacattatagtgttattttaagaattaaagctaatatctagaatgtggatacatagtggataatacatgttatctcattatcatcattattattattattatttgtgaggatgcactttaggcggccttctgtcccagatgatctatttctgtggtatttcatcatctcattccaaatgtcgaagttcttccttgtagtcttaagaagaatgggccttgggaatcgtcaggaaaaactcatgctattttatttcattctctattagcaagtggtatgttttgtgagcagaggagcagccctggagaagggtcagcaccatgcatggagtgttgagtcctctttcttgatgtcttttgctctctggtagaatgagcagactgtaccatttggcgggagctgggtcacagaggacaggcttcaggctctttctcaaatctcaagagactcttattgtcagaacttttcagatgctgtctggatcctctactagctgaaaactctaaataatgtccctgtgagttcttggaatggatgtccctgggcctaagacccccccggattatcagccagtgaaagactctcactatttatttcctatatctttggatgatgaaacacactaaatctaattttagcttatagtaagcattttgggtcacttatttttataattgtttttaatgaaaagtttgaaaaccaattttttttctcataatggattccaagaaacctgagtcaatcatctacataatttattcgacttatttgtagtaggttagatgaacaataacattgtttaagaaacttcttatttgatcactgctttgcatttcactgaccttaaaataaattatattttcctgagagccagagacattttgttccttacatgaaatgaagttctacttaaaacacacacatgttgagggcctgctacatgctagccattgttctagccaagggggtggaaggtactcaaattttttttgccatgtagtctcttccttcatgtacttcacggcctggccggggccagggatctgaccggaatgacataaacatattagactcttgtcaaactttagcaggcatatgaaatgcactgcacatgaatcatcaatggcatttattaaatacatcacaagtgcttgctatttcataggcaaattacagttcaagttattacattaatgttgtacaaattatattcatttctcttattaattgatgaagtttccaactttagatctctgactaccataaagtaatagcttttgcacctggctcttaaactagttttgtttggcatagaaggagcctcttttgctaaaaaaacagatggcctcctgatttgtagaatgaaattacattttaaggtgatatgcatttagatcactagactttggcatatttgcttaaaagcataacattattttatagataagtcttatgcattgacagcaatttcactcagaaagaaaagggaacagttaaagatgaatgttaatgtatgcttttaaatttttttctccatgtcccctatgtcacttttttttttttttttttttttgagacaggtggaggttgcggtgagccaagaacgtgccacttcattccagcctgggcgacagagtgagacttggtctcaaaaaagaaaagaatagaaaatacatgagaaaagtgactagggttctaatcctgattcagttattaattatatggttttaaaaggcagagtcttgttctgtcacccaggctggagtgcagttgtgcaatctcggcttactgcaacctccacctcctgagttcaaatgattctcctgccttagcctcccaagtagctgggattacaggcacgcactaccttgctgttttttgtattttttagtagagatggggtttcaccatcttggccaggctggtctccaactcctgagctcaagtgatctgcccacctcagcctcccaaagtgctgggattacaggcgtgagtcactgtgcctggccccatatgtcacctttgatcttctgttaggagagctgtacaatttatatcacaatatgaatattattggttatttctactttcaaaattatattattcatggtatgcagaggtcaaaactttttaagaaaaaagacattatgccttttttttttttttgagacaaagtctcgctctgttgcccagactatagtgcagtggtgtgatcttggctcactgcaacctccgcctcccgggttcaagtgattccttgtgatccgcccacctcagcctcccaaagtgctgggattacaggcatgagccactgcgccctgccaacatcatgcctttatagcgtaatttttctacattgattgaatttatcattattttcaattccacgtctattgcaaataaccttttcttctgtctctaggttgtaaagagagagatctttgggaatgtccatccaataaacaatgtttgaagcacacagtgatctgcgatgggttcccagactgccctgattacatggacgagaaaaactgctgtaagtgcttatgcgaatttgtcaacagagcatttttattttaaacaccagttaagtctcattttgaatacaagctaaaagtgtgtaaatatgcatacaaatcttttagtattttcacatcttttgatcaaactccacttgtaaagacatattctaagaagccaactaaatatgtgtaaaatatatacactataatattcttctggcattatttataatatgagaaaatcaaaatacctccaaatatccaataatagggaacataaactacaatcataaaagaaaataatatacaaatattaaaattaaattagagaagaaaaatttctcttggattcattatatgtcattagttgagtaaaacagaatattcagtattatgtgcactattgtcctgagttttgaaagtacatatatctacacatagaaaaagatcagaaagtcatatttaaaagtttacagttatagtctttgggtggtataattattaaatttttgtgcttttctatcttttctacattttctaagtgaatggccattgcttttagagccagaaaataattatgtctcttaagatgttttacctacaaataacagaaaagcccaaatcaaaatgacaaataatgaagacatttatcttttattatcatatacatatcacatgttttatattatcatatagagtcaagtaggtggactcttgaggctgtatgcagcagtttagcactttgtctgtgattttttcagttcagcttcaactcaggctggctcccacaatggtgaaaatatgacattaccaagggcatctggggcaccatgcttccttgatcatgtccagctggaaggaggaagaactgtgttcatatctccaagatatcattaagggattcgctcaggtcaactttgggcggagtcacagctagccgtcaggagtctttgtgtagttagaaaagacacttcctacaaacagctgaactgcaaaaagaagcaccacgcagggagaaccaatcaaaaaaaaggtgctgttttctccaggttgttcctgtcccaggctagggcacatggcacagcagcagagtttgggcaggagctgtcctgtgaagcacaatcacacaaccgtaggtcaaggccctgatatcggagcacatgtttactcctggactactaattgtattcagaaacaaacaaacaaaaaaactgtagacagaaaaatgccatgcccagcttaaactaatcaggatcttcctttggaagtggggatggctggtgtaggggcctgaacaaaatcgggctcccttaaagaaaggagggagaaaggaaatggttgttaagtaggcaatcaaggagatttactataatttttaaaacccaaaagagaactatgtatgactcagagagtcatttaataatagagatggaaaaaaaaacttattatgcatctctgtggacagagattgttttctatctaaggcggcttcagtctgttcatccctcatgctctgctcatgcagattttaaccccgttctctgatctttggtatttctgcggctgtgagtactgtttattcagtctgattgttagaaccagaacattgagtcacttgaacatagtaattctgtttaaatgctctttgtatgtattgatgtctattaaatgatattttacaaattatgttattctgtttttatgcccgtttggaagcctcagtgatcacatattttcttctttccatgctcctgctggcacatgaagatatgcatgttagtgataatcacatttatttctaaaatgttttccttctcactttttgttccccatgccagcattttgccaagatgatgagctggaatgtgcaaaccatgcgtgtgtgtcacgtgacctgtggtgtgatggtgaagccgactgctcagacagttcagatgaatgggactgtggtgagctacttgtttctgccatctgttgtactctctcatgcctgtcagccactgaagctgaatggatcctaaattacttcctggattttactgaccaagttcatctattttgttttactgttataaaagctgatagtgctgatctatgtgtgttatttccaactcacagaaaatttccccacgaagctacttctctatttgaaatatctatattgtatggaaaaacgtttgggttcaaaatgttgtaatcatataattgctgggagaggatttaaaaactcttcattaaaacccaacttcaataaatttaatgatagtctgccattcttttgtcacctctacctgctagaatagaatagtcaagtggcccctctgccttccctacactcttcaggtccaagacttctaactgtctagctccttacacagacaggaattaaagacatctcctaccagcacctccagtgttgcagtttgtgatcttgagtttgattaatttcctcatcccacactcatcactccttccattcactcagctctttctcagtcctttgcatcatccagccaaatcatgattctcatgtgtgttgtgatcaattgtgcagcgtttcctaagtgctctgaggctggttaagtacagaggattctcctttatataataggaattaacacatataccaaattaatcctaaatttgcatccctctcacgcacttgcgttctcgtatactttcttgaaggaaatgatagaaatagatttacaactcgcttcttgtaattatgcaaatcctggttaactcatgggatgaggcctggctctggctgtcttctaactcattaagaaaagttaagaactgcctgtctctttcattagagtctacggttctttgagggtagagaacatttctaattcattttttttttagccctctagcacactgaaggcagtgatttgcacagggtaggtacacatcaaatgattaactaaaataaatgaaaatgaatgtatgccaatgaagcagaggcatgtaaagttatgtgctttcatgggaagaaatgtttttaattagggtttcccttgtcttttctttccctagtgaccctctctataaatgtgaactcctcttcctttctgatggttcacagagctgccacagaacaccatgtgtgtgcagatggctggcaggagatattgagtcagctggcctgcaagcagatgggtttagggtaaggtcagtagtttgtagcactgatgaatttctcagaaggctttgtggaacttggcagtaatatcttccttaggatgcacagagagttagtgctctcaaacaaagagtccttcaaaacccgggaaatgaatcaggtgagaggaccatatttaattataggcacctgccctgaagagtgtgtgctggaaatgtactttgatgaagcctctaaaagtaaatgaagtaattgtattttaagtacttctgcaatgaaatgctttcattatttataaaagcattacaatcatttcctttgaggaatctggatgaaaatatcttgtaatttccccccaagaggttattgaaaatttcttcttaagcaacacacatttttaaataagctgaagttgctggcatttctgtttactctaagtaaggcagtaaatgtaaatcaagaaatagttcagtatatttgcttcttagtagaatgaaaagattcactctggctttgatacagatatactgaaatggatcctttgaaagttagatacttgctattttgtgaggtttttctttttcaattccattgggggtggaaagcaataattttcagggtcttagaatgtgtaagtatttcttttaccattgatgtatttgagatttgggggaaatgtagaaattagagaaattgaagacaaaggagttctaaaattctagactaaataaaaaattgagtaaatgccatttcctaagatccattgaacaaacttgaaacaattttacaataatgagtcatgcagttatgggatagcaactagcagcacatttttgttatcctagtttaaagaattactaatatgcagctcccaccatcttgagtccatttctcccatgtgaagaccaacatctttaggaattgaataactaatgctcatctataataaaggaattttaaactttgtgagagtggaaaaattatatttgccaagatctattaaattagacttcattctcacaacttccttattgtgtctaaatgaaataggttatgattgtgttcagagataaatgaaaaatcttttgaatatggttatttttatttttcttctcgataaaaccttattggtataaggttgaaactgcaaagattttacaaccagaaagtccttttgacaagccaccctgaacatagctgttctattgtaaatagaaaggttcctgtttttaaatatgcttctttatgtttcttctaaatatttgcatattgggatttttattgtgttaaaatacacatccataaaattcaccatttaaccactttaaagtgtataattcagtggcatttactttattcacaatgttgtgcaaccatcaccactctttgttttagaacacttttattatcccaaaaggaaactgtgtactcactaggcagttactctccattttctcgtacccactggaccaggtaacaactaatctgctttctgcctctataaattggcctattctggatatttcaatataaatggaaatatacaacatgaggccttttcatctggtttcttttacttagcacattttcaatcatctgtcttgtagcatgtaccagtacttctttcctgcttgtgactgaataatatgccattaaatggatatacattttgtttatccattcagacatttggattattcccacctttggctattgtgtgcacagtggatttttaaaaaattatgtactccatttgctccattttctcaacatagctggaaaatgaaacttcagtattttagatatctttagatatataaaattcaaatagacatgcagatactttttattttagattattttatttcacagaaggactaggaaaatctgagatagaggtgtggttggaaacccatatccattatttgactgatttaatgggaaaaatgggtaagtggtgataagtcctccaaagaaatgagtactagtagtttttgaactttttagttgccttgaagtttactctttagttgacttgagtggctcatgaattgacagaaatctggagagccaggctatgccgggaatgatggtaatggtcaagatgaggctatcttcctgctgagggaacaggctcaggcagctgccatgtgaccactgtctctcgagaccagctgctgtgctgcaaattcatgattctgccaccgatgcctcaaataaactctaagtcaccctgcacctttgagtcatttcctccagatcaaagcccttgctagaagggtttgtctggccatgattggcctatgctgcacaaggagggaagtgggaatggtgttccttcttagcttctggagtggagtttatgccagcctgcctttgtacattcagacatattctgcatcaaaaacttgaagtttaaaaagcaactcccaactaattccattcagcattccccttccctttttatttttgagtatctgcttatgggccttgtactggactaggcattgggtcgaggatgcaaaagtgaataacatcatcagagtttataatggagtggggaagacatgtaggtaaacagccaagaacacaaagttagaaaaaagtccagatattttgccatcagagaatggtgtagacttattgcatagaacatggcatttctattaaaattatacaagaaaaacataaaactttaatcttatcttgatagtataaatttgttgtatcactcattcattcatccgttcattcagtaaacatttatagagaacggcattgtagtgtgtatgtagggtccggaaccagcataccctaattccaagtggatcattcttctacttcagggggtatattttggagggaatttatcaagaatgcaggtctcccaaatttcatgggttgcagggattctactgaaatgctttcatgatagaggcagttgatttaaaacacctgcacttaggatgttttagacccaaattatgcctttcatgtgttgctgctcaaatgctaggctctcaactcagtgcttgtctagatgagaagatttagagttctttgttgaatttgaaaactttttgctttcatctgttgctatctcaagagttcagcccagattggaagtatgatggctctctgattagaagaatgcataaatcaagcccctaaattctcatggcagctgtattagtccatttttatgctgctaataaagacatacccgagactgggaagaaaaagaggtttaatggacttacagttccacagagctggggaggccccacaatcatggtggaaggcaaggaggagcaagtcacatctcacgtgtatggtggcacacaaaaaagagagagcttgtgtggggaaactcccatttttaaaaccatatgatcttgtgaaacttattcactatcatgaagacagtacaggaaagacttgcccccataattgaatcacctcccattggtttcctcccatgatatgtgggaattatggaagttacaattcaagatgagatttgggtggagacacagccaaaccatatcattctgcccctggcccctcccaaatctcatgtcctcacatttcaaaaccaatcattccttcccagtagtcccccaaagtcttaactcatttcagcattacctcaagagtccacagtccaacgtctcatctaagacaaggcaagtcccttccatcttataagcctgtaaaatcaaaagcaaattagtttcctagatacaatgggggtacaggcattgggtaaatacagccattccaaatgggagaaattggccaaaacaaaggggctacaggccccatgcaagtctgaaatccagcagggcagtcaaatcttaaaactccaaaatgatctcctttgactccatgtcttgcatctgggtcacactgatgcaaaaagtgggttcccatgggtcttgggcagctctgcccctgtggctttgcagggtacagcctccctcctagctgctttcatgagctggcatagagtgtctgcggcttttccaggcatatggtgcaagctatcagtggatctaccattctggggtcttgaggatggtggccctcttctcacagctccactaggcaatgccctagtagggattctttgtgggggtctctgactccacatttcccttccacactgcctagcagaggttctccatgagggccccacccctgcagcaaacttctgcctaggcatccaggcatttccacacatcttctgaaatctaggcagaggttcccaaatcccaattcctgacttctgtgcactcacaggctcaacaccatgtggaagctgccaatgcttggggcttccaccctctgaagcaacatcctgagctgtaccttggccccttttagtcatagctgtcatggctgggacacagggcaccaagtccctaggctgcacacagcacaaggaccctggtcccagcccatgaaaccactttttcctcctaggcctctgggcctgtgatgggaggggctgccatgaagacctctgacatgtcctggagacatttccccattgtcttggggattaacattctgctcctcgttacttctgcagccagcttgaatttctcctcagaaaatggtattttcttttctattgcattgtcacgctgcaaattttcctaacttttatgctctacttcccttatgaaaatgaatgcctttaacagcacccaagtcacctcttgaatgctttgctgcttagaaatgtcttctaccagatatcctaaatcatctgtcaagttcaaagttccacaaatctctagggcaggggcaaaataccaccactctctttggtaaaacataacaagagtcacctttgctccggttcccaacaagttcctcatttccatctgagaccacctcagcatggactttattgtccatatcgctatcagcattttgatcaaagcaattcaactagtttctagggagttccaaactttcctacattttcctgtcttcttctcagccctccaaacttttccaaattctgcctgttacccacttccaaagttgcttccacacttttgggtatctacagcagcaccccactctgctggtaccaatttactgtattagtccattttcacactgctgataaagacattcctgagtctgggaagaaaaaaagaggtttaatggacttacagttccatatggctgtggaggcctcacaatcatggcagaaggtgagaaggagcaagtcacatctcacgtggatggcagcacacagaaaagagagagcttgtgcagggaaactcccatttttaaaactgtcagatctcctaaaactcattcactatcatgagaacagcacaggaagacccacccccataattcaatcacctcctaccagtttcctcccatgacatgtgggaattgtgggagttacaattcaagatgagatttgggtggggatacagccaaatcatgtcaacagcatattgactttgctacttgcatgttcagtatcaaaaaacctatggacatttatttaattgatgatacaaatcagagtttagactgccttctaatatttgccaaatgctcagttgaaacatctggtatttgagtgagttagtctaagggaaaggtgactctttatatctctgggctccacaagctttatctaaagttagataatcgggaaacagtgtgtctgggtcatatgattttggcaaaaatgcttttatggagttagttgcaatttgattttatgccctaatcttttagtgttggtcaatagaagttggtcaaacattgttttcaaagaatatttctgtatctgggcaaaaccacaaagacaacatctattatattacctactagtccctaataatccctggtataagggtttacactttaacttcctcctaaaatttactcccagtcatcaccatggttgcagcattgtcttggacatgatatgaatggatcctgggtaaataagaacatgatttataacttgaataatccatcaggagttgaccaaagagggcttgtattatttctgttagaagcccttgtaaggaagcagtctgcttttgaagctagatatgccaggagacccttagtaatgacttaacttctgataaggtgtctttttcatgttgtcttcaaaacctactgcaatctggcttttacctgaaagacaggactgacagcaataatattaccaacatgcaaaagcctttggtcttcttttcttactattttacagtttggactgaaaatctgatttcttactctgacctgtcagacactgcataatttggcccctgccttcctctctgacccaatacatatcctagtattctccacttgcccactaaactttagacacattgaccttaatattgatgttaaaacatttcaagcataaaacatttcaaactttccttcaccgttatttttgcatagaatacagaactctagggcttcatcattcatgtctcagctcatacatctgtgacttaggctttctttgacaatcctacttgaggcagctttcagtctcagcatgtaactctatcacatttggttattttgtcttattccaacaacttatcagtatccaaaatagttttttacatgtttgtaatttgttcctctaactaaaataatagctcctcagagagggactccatctgatacaacaccaatctgttgtctccatttctgtcccacctcattaacctctaagcatcagttttaacccttgtctatctggctctgtcacttgtttaaagtgtcactataatgtttcttctgagctccaactcactttatatcagcttgaacactcactgattaacccattgtatcattaataaacatgtcaaatctaatttcaacctaatcttttacatttcctatgtcttcttaaaactaacatacaaactgaagaacatgtagaatcttgactctcaagaacaatgaactaacacatttcaattaagatcacatgcagcgggcacatattgtgttgcttctctgcattcctcccttcctttgggacctacatcccttccttctcgatatttacttcacttcccattttatccttgggctccaaatgggagcaaccttctttgtacatgactttctcttttgggtctgggattggttgaggggtaggtacctatcccaagatggaccaatcaaagtgtcttactgccaggccaaagtaattggttttgggatacttgtttcttcaacaagatttttatttgtatcttcaacaaggtttttatttgtttatttatttaagacagagtttcgcttttgtcacccaggctggagtgcaatggtgtgatcttggctcactgcaacctccacctcccaggtttaagtgattctcctgcctcagactcctgagtagctgggattacaggcactcaccaccatgcctggctaatttttgtatttttagtagagatggggtttcaccatgtagatcaggctggtcttgaactcccgacctcacgtgatccacctgctttggcctcccaaagtgctgggattacaggcgtgagccacacccggcccaagatttattttgattggacctgggagagatgacttctttcttttttggttataaagacgaatgcctgtgagtttagagctgtaggcaaccagtcctttggcttgcagaaaagttactttaagccaatcaagctgccatcccctttgccctcctccccacaacacagaaggaagtggagacgagctgaagagccttgagggtactggttccctggcatcaatcatcctgaagaccatccacatctctttagtaatcaattacatttccactttttgatactcatatattccagcactattttaggcatttttaaaatgccgattttttagttaattcaatatttgtttaattttttttgaattttgaattaatttatcttgtaatggatccatatagttatatactgacttaaaactttgaagtgaaaagtgatgcacgtatttttagaaagcatttttatattcctgttatactcaagaagaagagaagagcagccaacaaagcaagacttgtgttagaaaaatacattctactctggttcacagtctttctgaagaactggaatttaaaaagtcatgttgaaattgaaactgataatctctagctttacatgatgaaacaaaagatgtgaagataaacaagaaatattttctttgaaactaaaattaaattgtcaataaaatgttgcatttctgtctctcaaaaaaaagtgttgtcccaaaaggtcaagttctcgaaaaaaggagatgagatttttgaaaataaaatagccagaaggaaatatctggactggcatagattccaaaagaggtagacacttctgctcaaaaatattcttacaacatgtttattttataagactgaattttatatatgttcaaatgatattttcattcaaaatgtttatgattgattatttttacacttttaataagatgtttattttaaatggtgctttattttattaattttgttttctaatttatattagaatgataatgtatatttaacagtcatattttataaatttaaattttagttcacattacaattttgtaatttttatattggaaatggattaaatatttagttttgtttattagtttattttatgaaatataaatactctgcaagttaattttatgatccattaacctcccccctttgctttgagatagttttgtcatttgtacctatagatccttgcctaatacagttactacactccatctctgagatagacaaacacatagtcaaagaataaaattataggctgggcgcagtggctcacgcctataatcctagcactctgggaggctgaggcatgtggatcacttgaggtcaggagttcgagaccagcctgggcaacataatgaaaccccacctccaccaaaaagtacaaaaattagccgggcgtggtcgcatgagcctgtagtccccagctacccaggaggctgaggcagaagaattgcttgaacctggaaggtggaggttgcagtaagctgagatcacgccactgcactccagcctgggcgacagagtgagactccatctcaaaaaaaaaaaatctatctaactatctatctctatctatctatctatctatctatctatctatctatctatcatctattgtcagttaggattgcaataaaaagtgtttttaaaatactgagttaactagaaaaataagctcagaacttatgctctgctttaagcatttctattgatgaaagttttgctgtataaactcccattgaactgagctatccagcctgagaaatgtttctgtagcagagttcattcatgttttgtttgaaacctattagtacctgcctgttaaaatttctacttgacacaataactttcagttattagtatgtcaaatctgtgggacccaaacagggagaatatgacaagattcaagaagagatttttgaaatcagatacaaaatgtttagtataaatgtttcaagtttggaacaggatatttagaattgcaaaaaatttatcttatccactgtgaaaggcatttatatgtcaagatgaactgtcaaggactgaggctggatgcttagattattttcccccatcaatagatggaagaggacaaaccttatccttcaactgaagtgtgttacatgtctaggtaattcctgcacttctgtcttgttgttagaggtaagaaaaaagccctggttttgggggaatttgtgatgaccttcgttttttaagtaagcagccccaacataatcataattcaagcatgggatatttattactaaacgaagtgacttgaggatgggagagtaggccaaattgtctagggatctggctgttctcctaagccttgaaatatttaatccctctcataatgtcaggatgttccagaactcctaatgagctctgttctctcatttcagcatcagaaaagtgatatatttgtatgtgtgtcttatgactacacaattcctcaagaagcaaatataaggcaaatccttttgcttctctgtatagcactgccttcaggcccagagcagaggggccttgccctgggctccatgatttagagcagtggttctcaaccaggggtgactttgcccctagggtagcaatccccaacctttttggcaccagggactggttttgtggaagacaatttttccacagactgggatgggatggggggaatggttttggcatgattcaagcacgttacatttattgtgcactttatttctattattattacattataatatataatgaaatcattatactactcaccataatgttgaatcagtgggaaacctgagcttgttttcctgcaactagatggtcccatctgagggtgatgggagacagtgacagatcatcaggcatttgattcccataagaagcacgcaacccagatcccttgcatgcgcagttcacaataggattcacactcctgggagaatctaaggccactaattggacaggaggcggagctcaggcagtaatgcctgtgatggtgagcagctgtaaacacagatgaagctttgctggcttgccccgcactcacctcctgctgtgtggcctggttcctaacaggggccctggggctggggacccctgtcctaggggacatttggaatgtctgtagacattattttttaaattgtaaatccagggttgatggggtcttacttgctagtgggtagaagccagggatgttacaaaacatcctgcagtgcacaggaatcactctacatagcaattaattaactggtataacttgtcaatagcatttagggtgagaaaccctgatttataggcaccctccggccctcctcctctagctcaccccatggggtaaggactctgttagccaaggagttctgctcacatggagcctcatcccttttctagagtgatgctttcaaagtgcggtctcagaccagcatcatcatcatcacctgtgatcttggtagagagacagattttgggtcccatctgagacttaactgaatcagaaaatctggggatgaggccaacaaatctgtgttgtaacaggtcctccaggtgattctgatgaatgctaaagtttgaaacccactgttctcaggagtccaagagttctgtatttgaacctaacagatgtgtttgtcaagagaggaggagagaaattttctttaacagcttgataacttgatttataacttctaaatatgtagacaaatggcaattgggcctccactggtactcttgccctagctgctggattagatcattgctaaaatttccttctccgtgtatgaatccatagatgctatggaagcattttgagtctgtattacctgcacagactcagttaggatacagtgactttgatgcttaaattttctcttttgctttctacacaacaggacttttttgtcttttcatataatacaaaacggtttcaattatttaagtcaaaagcaatcccaatcatcaaacaaaatttgagcagctcttaagttccagccaccttttacgtaagatgatttacatagttttaaaaatggagaagtacaggcacacatattcttgatgtgcatgtatattactattattctttgaaatggaagttcataataccaatcaaaaattcaaattttgattcaatgattttatttctaggaatttattccaaaatcatacttttgcatgtaggcgaaggtgaatgtttacgatattaactgctgctattttatcatacccccaaacctatgtgtgcagagattagttaagtaaatgtatgaacatccatgtaacaaacactatgcagctatcaaaagaacatggtgtgctgtcaatgggggagaactgtgtagggttcacactttaagaactgtactctgacatgagaccatagggattaaattaccagctttgccgtctgcttgttttgtgccttgggcatgttacttgttttctctacctcaattttttcatctccaaaatgggaaataattataaagtctacgtcacagagttgttgagatgattaaataaaacaagttagtcttttagtgcttgtcatatagaaaacagttaacacctgttagctgttatggtggaaagacttctaagataagtcactaagtgaaagtatcaagaccacacagaacaacgtgtgtagcaaaggagggaaatgtatacatgaattgtagaaagagcttgacaaagatactcaaacactatttacagtggttgtttctatgcatctaagataggaagaagacaactttttcattttataattgttgatatgataggagaagaaaacaactttatcattttataattgtcgatatatttttctgtgtacaagtattacttttataattttcaaagttatttaaaaaaaccatatatccaatgaggttagtatccaaaatacataaggaactaaaataattcaacagcaaaaagccaaataacctgattgaaaagtggactaaggacctgaacagacatttctaaaaggaagacatagaatggccaacaaatataagaaaaggtgctcagcattactaatcatcagggaaatgcaaattaaaatcacaatgaaatgtcacctcatatctgttaaaatggttatcatcaaaaagagaaaacataaaaaatgttggggagaagtggagaaggggaaaccctatatattcttggtagaaatgttaattggtacagtacttatgaaaaacagtatggagattcctcaaaaaatttaaaatagaactacctaccatatgatccatcaatcccacttctgggtatatatctaaaggaaataattatctcaaaaagacatctgcactctcatgttaattgcagcactcttcataatacccaagatatgaaaacaacttcagtgtttgctgataagtgaatggataaagaaaatgtgatgccacattttctttacacaatagaatatatatttctttatacaatagaaattttatgcaaagaatacacatacacacactacattttctttacacaatagaacactactcagtattcttagaaggaaattctgccatttgagacaacatggataaacttggaggacatattaagtgaaatacgccaagcacagaaagacaaacactgcatgatctcatttatatgtggaatctaaaaaagtcaacttgtaaatgcagagagtagaatgttagttgccaaaaactaggggatggagaaaatggggagatggtcaaagggtacaaagatttggtaatgtggaatgaataagttccggagatctaatgtacaacatggtgactatagttaacgatgctaaattgtatacttgaaatttgctaagattcttggccttagtgttcttaacacacacacacacacacacacacacacacacacacgtaactatgtggtgatagatatgcttcttagcttgattgtggtagccatttcacaaggtatacatatatcaaacattacattacaccccttaaatatgtacaatttttatttgttaagaatgcctcaataaagctggaaaaaaaagaaagggaaattgaagttatggagatgctcagattctgtacgatggcagaaatacaaccaaacaaattcactgacttttttaaatgggccattggatgacatttctggtgctgaaagtttatgtttgtgcatgagaaacatgccagtgttcaagaatttcatggaaacctaattttcataatgatactcccctatccttgatgattaatttcttaaattttccacttataactgagaaattccatctagattgcctttcctcttggaagctaatgaatgaaatgcaaaaacatcctgtggatgtctgtggagcccttcctcagggcagctgggggccttttgagttgaaaggctggtgttccttgcaatgattttcctatccagcatcagtgcacactctctcctaattgcactccccatgcaagtatcttgttgccctatgaatacctgatttaagaatgacctgattaaataacaaaatctaaagtttatcttcttttggctttacctggatttaggaggtccataggtagttctatcgcagaagggaattctcaggatgcaggttatcaggagaaacaccatgaccagtatgtgtggcctctgacttttatactttccatctcactttgcctctgcattcagaacttctggaattgatggagagccggattcattttggccaagaaaaagaaaaattcttatttttgtaagaggtttttttgatatcttcggtaatctaacagtcaattcaaatttctaaataaatttatatcttaagccactcttcttcattgtggctaggatgtatgacatttgttttaaaatcaaatgtttataattcattcattatgaaatactcttgtgtttttaatctttggctcttattctatcatcaagtattccctttagagggttcttccttgcctttttaaaagtatgagttaggggaagtttttgtccattttctattatgtgattacaatagtttaaaaataataatcagatgaggccaggtgccatggttcatgcctgtaatcctagcagtttgggatgctgaggtgggcagaccacttgaggtcaggagtttaagaccaccctggacaacatggtgaaacctcatctctactaaaaatataaaaattagctgggcgtgattgcatgtacctgtgatcccagctacttgggaggctgaggcaggagaagcacttgaaccctgaggcagacgttgcagtgagccgagattgtaccactgtaccccagcctgggcaacagagcaagacttcatcaaaaaaaaaacaacaacaacaacaacaacaacctacaaacatagaaatattacaattcttacaacttttatgctgtctaaataaatgctaaatggccactgattctctttatgtgttgtttattttattttatattgctatattgcagaattacaatggacaagaaaagaggaggaaaaaaacctagctagatacattttattttacttttgatctctgcctaaagttattcttatgttttacctgttggaacttttgtatcatacacattataatcctaacacctcatgcagttcaaacacaggtcagcagggagaatgactaaaacagctctaacaatttgtaacagtccaaattctcctcttgaaatgttgacatgatttagtgcttctttttgaaagggaatgagtgctaaataatgataatgcctgttcaaagatcattgtactttgaatacttatccagtatttgccttgtatcagagaaccatctgtgaccaaattgatacaggaacaggagaaagagccgcggtggctgacattacactccaactgggagagcctcaatgggaccactttacatgaacttctagtaaatgggtaagaatgcattcataagagctgtgtagagtcagattacagagcaagagtttatcattgggcctttcttccattttttaacttaagataatccaaatttgtcatatcagtaaagagtttccatagatttactattgcctttacatttcaacattggttgcttttatttcttctttctagacatagattttttttctcttttattcacgattacagaaactatcatggcgaggagagaggaacttgggttctaatcttggattacttttaatatcttattcaaaataaaccctcatgtctgcatttcctgcagatgctacatagaactagtaaacagagggaactgaagtaatgataactaagaaaacttggaatgtctaagagaggaatagacacaaaaatgaaattataatcaagttgccttgaaagtacacttaagtttaccctaaaaaatcattgcatcttaaacagggttgcttcccttgtctatgggtggggtgtaggaggaagataaattgaggaaatttacacttactaagttcttattactttataggcacacagctaggtaatcttatatacactgactcgtttaaacctcataatagatttgtgaaccatggatgattatccaatattttacagcttgaatatttaaataacttgctcaaatctcacagcccacagatgctaagtgatagtgtctgaactctaaataaatatatctgactctgaagctcataaatgttgctacttcttaagaattttaaagaggaaaactaaaaatggaccatttcctcttaaaaagttcttgacattttcctcataaaacaaactctgcagccaaatttctgaatatttgtcaattgaagtacttcctctaaaacaatgacctaaatcttttaaccaagtgatttgtttccccaaacctgtaattccagaaaaaacctttcaggtcaagtaaataaataaataaataatgcattctagattgggagttggtaaacttggttctagtcctggtttactaactacaagtgttatcttatataactgcaatttccactaagaagttggatgaatagtctttgatgacttttcctattcctaagagctatgtgttttcaatctaacaaataacaactaattattaagtatttctttaatgccaagttcagtattaggctttgaggggatgtagaagtgaatgaggggaaatgaaggccctcatctcagggaacatacactatatgggggtgaaaataaagattataaattagtaaaaataattttaggctttggtaagtgctgcaaataaatttagaataatgtaatagagagtaaggaagagaggattttagactgtgggagggtagaaagcaaatgagcttttcctgtattacataatttattgtatgcaaataattgcacttgcccctacataaatttagcaagaaatgaaaatacagtaaatcttcagaaaggaatgtggaaattatatatttagggttgcatttttttttttcaatctgatagatctaggattctaagtacatcatagtatttttgaaagtcccaatatggatttttattgtcctttttcatttacattgaggttgtaatgtaaatgtttcatggttggaagagaacttagtgattaaaatttctaccccaaactgaattatcttgtgccatcacattgaaagatcctttaacagggaccatgttcttgcattcaaagttgaatttagattttagaaaattcttttcctgaacccacaattcttgtaaattgcacctactagttctgatcatgtcgtctaaagttatatgaagcaaatttaagctacttttcctcttgtcaacttctcatatagcagaaatttaaccttgagagtcttggtaagactcctttccagtctaaatattccatttcttaatctgttcttcaaatttctgaagtcatattttactcatcttggagtatttctcaacttgttttgagcacacaccactttgtataagcataaaaatctgacatgctgcctcctcaccactgactctaaaaagtactcccatctccccttgagaactgtagtttgaatttgcattgtggtggttccaccagccaaaatgatgtgggaaattttgttaaaatagtttcttttcccacaaatgtgaaattaaattatgatgacattaaataaactaaaaaaagaagtatatatattccatatactcctgcctacaacatgattaatatctgaccacactcctgccttgagaattcctgcaccaagaggaatgtgctttcctgtggtaacacaggaaatgctcagagaatgtgatttctggtggtaacagttggagctgtcttgtatttcactggtaaagtgtttgaattgaacaagaaatatgtaacttaatgttataccattttatgtttccaaatccaggcagtcttgtgagagcagaagtaaaatttctcttctgtgtactaaacaaggtgagagaattagaggtgtggcaatgggatatgaacttaattgaactggattggctcaggggaagagtgatcgcttgtaagtgacagcaaagagctaagcatttagcaaggtttggcatcaactcacaaactgtgtcttctgctccttggtagactgtgggcgccgccctgctgcccgaatgaacaaaaggatccttggaggtcggacgagtcgccctggaaggtggccatggcagtgttctctgcagagtgaacccagtggacatatctgtggctgtgtcctcattgccaagaagtgggttctgacagttgcccactgcttcgaggggtaagctgcacctttccttttttcctttgcctggatttgatcactttgtcactcgggaattctcagtggcatatgtaactccatgaagccacatccaggcgaaagccacagctaatctacttcccaggcctttatcttcctaaagttttctatccttgatgttgccatctaatatgtgggctgctcatttgttggaaatggctgcatattgcttccaatttttgtcctaagagagagaaagaagtttagaagactgactctatgctactattagtctcttttctagacctcttaaatatatcacatatataataacttaaacagaagtgatttatttggatactacaatgaggtttggatgcaggcgcaactggtgagtagtttgggaagcagagttaaaggtataatgtgtgtaatatgtgtgctattcagagagagtgtgtgtgtgtgtgtatatatatatatatatatatagagagagagagagagagagagagagaggttatgttatgccattttatgtttccaaatctaggcagccttgtcatagcagaagtaagatttctcttctgtgtgctgaacaaggtgagaaaattagaggggtagcaatgggaaatgaacttaattgaactggattggctccgaggaagagtgatcacttgagcccatccaaaccaaaccaaaccaaaacacagacaaaacaatgatgacaaacaaaggtttgttttgacataattggcttatgtgattctggaggcttggtgaatccaaaacctgatgaggtaggtggcaggcaggaagatcgggcaagagttgcagttcaatctgctggcagaattccttcttgctggagaggtcagtccttgttctattcaaccccatcaaaaagtgggcgaaggacatgaacagacacttctcaaaagaagacatttatgcagacaaaaaacacatgaaaaaatgctcatcatcactggccatcagagaaatgcaaatcacaaccacaatgagataccatctcacaccagttagaatggcaatcattaaaaagtcaggaaacaacaggtgctggagaggatgtggagaaataggaacacttttacactgttggtgggactgtaaactagttcaaccattgtggaagtcagtgtggcgattcctcagggatctagaactagaaataccatttgacccagccatcccattactgggtatatacccaaaggactataaatcatgctgctataaagacacatgcacacgtatgtttattgcggcattattcacaatagcaaggacttggaaccaacccaaatgtccaacaatgatagactggattaagaaaatgtagcacatacacaccatagaatactatgcagccataaaaaatgatgagttcatgtcctttgtagggacatggatgaaattggaaatcatcattctcagtaaactatcgcaagaacaaaaaaccaaacaccgcatattctcactcataggtgggaattgaacaatgagatcacatggacacaggaaggggaatatcacactctggggactgttgtggggtggggggaggggggagggatagcattgggagatatacctaatgttagatgacgagttagtgggtgcagtgcaccagcatggcacatgtatacatatgtaactaacctgcacaatgtgcacatgtaccttaaaacttaaagtataaaaaaaaaaaaaagatttttatctgaatgggtaaggcccatccacatcatggaatgtcatcggctttactcaaagtccgctgatttaaatattaatctcataaaaaaaaacaccttcacagaaacatatagaataatgtttggccaaatatttgggtgctgtggcccagccaaattgatacataaaattaaccaccacaatatgcctaaagagagcagaagaataaaactaagggaaaacctaccccaaactgacgaacatcactgcagaatctcttccagctatctgttgctatgtaatttgtagcaaaacaaaacaaacaaaaccaaacataaacaaaacaataacaacaaacaaaaactcagacatttattatgctcactgaagattcagacaaagtgtagttggcgtaatttgtctctgctctgtgatttctggggcctcagctagaagattccaaagctagggagaggctggcaccatctgaagtctgacagtagatgctgcctgttggctggggcctcagttcctctctgtatgagactcacttcatggtggctggcatcctccaaagcaagcttcccaaaaaggaagccaggaagaagttgtattaccttttttgactcagcatccaaaagcacaaaatgttgcttctcctatgtggttgcccagagccatcagtcacaggccccacctaattcaaagggaagaaacacagacctcccacatcaaaggacttgaggacaggttttgaaaaccaccatactagccattttattgtatttatttttagtaattttactttatttaaatgaagtaatattaaataatagcaaaaattcgaggcaaaaaataatccacaggtctattacttaattaaatggatacttttcatttgatctgattagtttctaggaaaaaaatgcaatttcattttttgcctatttgcctgttattattttgtcttagcttagccaattattgtgtgaccactggccagctcagtaacttctatggaccacagttttctgttatgtgaaattaaagaaataataatccctacctcacagagttggtgcgggcaggaagtgaaacagtctatgtagagctttaagaactatgcctggcatcaaccagtaagacaccgaaaggtaaacttttcttttaaaaaaactattgctaaaatcatgcattctgcattttcccttagcattatggcatgagtatttttgcattttgctagcactattctcccacactcatttaccttaattcctgatcatccttaaggtaacccctgttagtgcattatgaatattctcccacaatcataaacacctatctttttcacaagccgtcattgtttacttttacaatttggaataacactctataattccatttgttagttgcttttctcatggagcaatatatcatggacatctctccaggtcaactgatgcagctctaactcattttttttaagccaaataatattctatctatagatttattataagttttaaaattattccccacttgatggacatttggtttagttccagtttgctgccattttaacaatactgcaataaatgttcttaaagaaagctactcacctattagtactcttgtttgtagaggatacagttccagcacatacctgtagtttcataaggaagttacacagatggatacatgttttgttctctaaggggctaatctagtgaggagacacacttttaaacaagtaattagattacagtgtgatagtgattataaaatggaaatgtgtatatccagttatttgattgctattttgggggaaataaagcattaaaaaaatctaactagcaccttcgcttgagagctttcaatgtgtaagatccagaattattggaagagtctgcatagtatgtcaaaaaacacactggaatgttattgctttagaaggggccagatgtttccagatgtcttttgcagacctaatttgtaactccatggtaataagaaggttacactagcaagagtacattcatcaagcgatgattacctaaatgaatccaacagtttttttcagggaacagcactctttatgtgctagttaattgaggttcatatcccacttttgttatttccacatgtggtatccaagtttcctctttcactgacagatctgtaaagttcaggagaaatcttgcaatagagaagaaatatgtgcttataattaaaggcacgtacataatattaaaggccttggtaagtttcatgaaacactaaatttaacaaaactgtgaagagaggcctagtctatccagaagaagttagaaaatgccccactttaaacaagcttttgcttgaatgtgggctaataaccctgattctattttataacatctccaggggagtagcaaacttttgggaacttctaattgtatgccatactcccttttggagctatcaattacagcaattaatgggatttacttcatatcctgatcccatactttgatagggcctagagtgacccattggtgggtatcctcagcctgtctcttttttaattatatttatgggaaaaagacaagtttgttttgctctgctatgaagaggtagataaaaatcccaaatgaaaatttaaaatcatgagatggttgaccagatcaagccccatatgtcctagtgacaattcgctttcaaaagttctaaggaagaatggttttgactttcatgggtaatttagcaagcaattttcctgctttcttccacttctgaaagacttaagaatgaacttcctaggctggcacacagctagtaatggtcagaaacatctgattcctctccaggaaacccacgtgaaaaactgtcctcccactatatgaccacaacccatactcctgccatgtcacccatgtcttgattcccttcacagcagctcttcaatccaacaagatttttggttggtggctgcactttctgccctagtatctcagtccaaagagtctccttcttgcctcctttctttttctttcttttttttttttgtgagacagagtctcgctctgtgcccaagctagagtgcagccgcgcgatcttggctcactgcaagctccgcctcctgggttcatgccattctcctgcctcagcctcccgagtagctgggactgcaggtgcccaccaccatgcccggctaattttttgtatttttagtaaagacggggtttcaccatgttagccaggatggtctcgatctcctgaccttgtgatccgccctcctcggcctcccaaagtgctgggattacaggcgtgagccactgcgcccagccctcgcctcctttccttccctcaacttacctcgttccctgggttcatcacttctcacttcagtcttttcactaggaccttagacttcttcctccctagatttttccaacacactgggcaggcctccaaagtcaagatcacatttttcctttcctttcccttcctttcccttcccttccctttcctttcctttccttttttttttttgatggagtttcactcctgttgcccaagctggagtgaagtggcatgatctcgtctcactgcaacctctgcctcccgagttcaagccattctcctgcctcagcctcccaagtagctgggattacaggtgcctgccaccatgctcagctaattttgtatttttagtagagacgggatttcaccatgttggtcaggctggtctcgaactcctgacctcaagtgatccacccacctcggcctcccaaagtactgggattacaggcatgagccactgcgctcagcccacattttctaatcctatgtctatgctcttcaggactgagggagagcattactgaagaatgcagattactgccatgcctgactttcaacatcagttggacccttaatattactcaataatcttccacctatttctaaacatctctctctcctattcccaagaacaaaatctttgttcttgcttgcccacctgccctgctctgtcagtcttttaatgcactgagaaaaggaagtgagaagtttggtttgactttttattactgagctcatgctgtgtccttctgcctacttctttatcttctaggagtgtatgaactgtgccagtcactcacaatttgtctttctattccatctactctaaggatttggcccattcccatcaatagtaatgtccactaaaagaaaaattttccattttagctccatacctcccatggggtgctgtttctcagcatcactggggagtgagcaagtgtggatttaaaaatccctaggtgactctgaccttacgtcatactccccactgccctgccctctatggaaatgttttccgtcaccctctcctctccactggaaaatgtctgggtctaggatatagctagcaggtggcctaacgtgcaatcccattgttttggggggctttcagaaacttggagctctctcgttttaaattgttgtggttacttgcctgtgtctttcagtcttgtcactccctagtcatgtatgttgcatctgcacctgaacacctgacccactttggagaatatcatacacctgtctgctaactgaggtcacataaaatatatgatcataaaccccaaatgagcatctaacacaatcagacactttcaatatacttccacagtaaagtcacttttctactctgattgtgaatagacaactatttgacagcttattctctgtctccaaatctttgtcatcctttactgatctcaccttatacttcatgaataaaatagatgccatcatgtctttcaccttgtctcacccccaattccaacaaatcacctgcctctttggccacattcactgctttcccttgagtatggtggaggacatgtctttgctcccattttaaaacaagcatatcccctttcatcttttcaaagactttactcctaaagttatcatttttattttgcatcattaatttatctttttttgttggatcactcccttcagcaaccatgccatgtcttaatatcacaaacttgagccccattcttttgaattcatatccctcttcatctgttgctccattccagccactgttcacagaaaaattcctaaaagagtttcctacagtcactgtctacacctctccatgtcccacattctcttcagcccactctggttgcgttcttgtcaagatcattacagaagtgacgcttgttaaaatctctaatgacttccatcttgcagtccaatgatgtattttcagttttcaacccactggaaccctctccagtattttatcactacatccttcttgaaatactttcattttcttctaaaataacacaaaaactccttgttttcttcatatgtcagagactaactctttttctcttttttcagctcatttttaggctactgaatgctttagttcctagggaccaaattcttggctttcttgtatgtctacactcactcatctcatcacatggtttatatacctgtcctgatttgaacaaatacttgttcatatttgaaaaatatgaatataaggtatgtgaatattaatatgaatataaagtatgtgaatattaatatgaatatacttgaatatcaaatatatgaaatatttcttcataacttttaaatttatatctccagcccagcccagatttccacccaatcaccaccacccaccaacttcacatgaatacatttaactgtgaagataagatgttcatttgaacatgtaataaacatcttactttatgtgacctaaacaaatctattgatttctcacttctcccactgagcaaataattgttgcttcacaaacttcccccatctcagtaaaaggcatcatccatcggttcgctaatataccaaacctaggagtcatccttaattcttctcacatttactttatcagtaaatcctgtagaatcttcttccaaaaaagtggaagccaagcatctctcccatcctaatgctataatcctactccaagccaccatcatctcacttctggactatttatttcctagggctgccataacaaagtatcacaagctgggtgatttgaaccatacagttccggaggctagaagttcaggatcaaggtactggcagggtttcttccttctgagtgttgagagagaatgcctgttgcctagatcccggtggtttcctggcaatttttggtattccttggcctgtagaagcaggaccctaatgtctgccttcctcttcagacagtgttctccttgtgtgcctgccggcattatactggatgtggattagtcatattggattcaagcccatcctgatgaggttattttaacttgattacctccataaagtccctatttcctaataaagttataatatactaggagttacaacttcaacatatagattttagagggacacgaccaatccataatgactactgaaacagtttcctatttggctttttttgactactctcttgttcccttattacctattatccacacagtaagatagtgaactttctaaaatgtaaatcacaccatgtcactcccctgcttaaaaccctacattggcttcccattataacaagaataaaatcttttcattggagcctattaaggtctagtcccagcactttgactgtgtctccttctagtctcccatcactcactgggctctaaccatgctagctttcattcagctcctgaaatcctccaagctcattcctgcctcaggacttttgtatttgctgtttctgcagtttggaatactttcatagagtcataaaactacttccttttcattgttcaagtctcaatttgagtgtcactttctcaaagaccttccctaaccaacctagccaaagtgattgccccgtcaaatcttctattacattaccataaatatatttttttacttctaagtgcccgagataatcttatttgtttatgtactttttttttactatctagtttagtggaatgaaaactctatgaagacatgaactccatctgccttcctcactcttgagtttttatttctttcagcatggcatacagcagccactcaataaatacttgttagttgacaagtcagcctcttcttggtgtttcttagtaatcatgtctgtagtcatttcagtatgtagggctgtaatttgtctcaaactagaaatgttaactcttctacagagagtcagtgatctcaccagctcctcccatgccttggaccgcacatcaattcaccatttccaatgtattaagcacctgtatgttttcatcacatagattaatcatctgggtattgtctgaagattattctccttgaatatagaaattggaggtaaagggccaagtatggtggctcacgcctctaatcccagcactttgggaggctgaggtgggtggatcacctgaggtcaggagttcgagaccagcctggataaaatatggtgaaaccgcatctctactgaaaatagaaaaaattagccaggcatggtggtgggctcctgtaatcccagctactctggaggctgaggcaggcgaatcacttgaacccaggttgtggaggtggttgcagtgagctgagatcatgccattgcactccagcctgggcaacaagagcgaaactctgtctcaaaacaacaacaacaaaaaaagaaattgggggtaaagtaagcttcaaatcattctgctttgtcttacttatctacaaacatttaaattatctgctacagacaacaattttcctcttttcttgttctattttgcacatcattttgccaagaagccatttttatttttcccactttgtttctttttagacaaagccctgctcattcaataagtaagacttttggacaattactttgatttcttttttttttttattatactttaagttttagggtacatgtgcacattgtgcaggttagttacgtacgtgtacatgtgccatgctggtgcgctgcacccactaactcgtcatctagcattaggtatatctcccaatgctatccctcccccctccccccaccccacaacagtccccagagtgtgatgttccccttcctgtgtccatgtgatctcattgttcaattcccacctatgagtgagaacatgcggtgtttggttttttgttcttgcgatagtttactgagaatgatgatttccaatttcatccatgtccctacaaaggacatgaactcatcattttttatggctgcatagtattccatggtgtatatgtgccacattttcttaatccagtctatcattgttggacatttgggttggttccaagtctttgctattgtgaataatgctgcaattactttgatttcatgcctttcttttatgatagacttcaaagctctgagttttttttctttttttgagacggagtctcgctctgttgctcaggctggagtgcaatggcacggtctcggctcactgaaacctccacctcctaggttcaagtgattctcctgcctcagcctcccaagtagctgggactacaggcacgtgccaccacactcggctaatttttgcatttttagtagacatggggtttcactatgttggccagtctggtctcgtactcctgacctcgtgatctgcccgctttagcctcccaaagtgctgggattacaggtgtaagccactgcactcacctgctctgaaatctttatgtagtcacatttactgttcaactgattcttcattttcttgcatactgcaactatttgtgatggtagtatcagaatttggcacttaaactctcccaactttgttgagccatgactgctttaagaatctctggacatattatcatagctttttccccctgaaacattctgaaacttgattcttgaaggtctagaatatgcatgtgactaaacccttctcttgcattttttggaacctagcataatagaattgttcatttcctgtaattttatcaccgacggctagctttctatcatatttgagggatacattcaggaaagagcacacatcttcctgctatctgtcaccttatgactcacaagagtctccatccatcctacatgctttccctcctgtgcccagtacctaaatcctttttgatgcctgtggacccttgtctttgtttcagagaagtttagttgtaaggatgtggtgtagcaggttcaaaggaccagcaagttagtctgttaccatcacttgctgtctctgtgactttagatgagttgctcatctcctctgagtcactgatttctcttctctaaaatggaacaatgaatccctgtttacatctcacagtcggtgtgaggatcatttggaataaagtgtgtagaaacacttggaaaactattgagattgtatactaatgagacatccaggctgccaatctagtttgcttgttgtatccatttttaaatttttaggtagcatttaaaaccacagatactttgcataaaatccagaactttggctttccttagacaattggaaggtcagattccactgagcattccaacatgacaacaattttctggagctgagaggcgaatggccctcaggatgggcagggcttgtgatgtgacacagtctgtacttactgaatttaccccagccacttcatatatttactttgaagtctctattctaaagtctattcaccagatttatagctgaaatctaccaaaggtacaaagaggagctggtaccatatctaccaaaactattccaaaaaattgaaaaggaggtgctcctctctcactcattttatgaggctagcatcatcctgataccaaaacgtggcagaaacacaacaaaagaataaaacttcaggccaatatccctgataaacattgatgttgaaatcctcaataaaatactggcaaaccaaatccagcagcacatcaaaaagcttttctaccacgatcaagtcagcttcatccctaggatgcaatgctggttcaatacaaaaagaactaggcgaaaaccacatgattatctcaatagacacacaaaaggcctttgataaaattcaacatcccttcatattaaaaaactctcaataaactaggtattgaaggaacatcccttaaataataacagccacttatgacaaactcacagccaatatcatgcagcataggcaaaaactggaagcattccccttggaaaccagcacaagacaaggatgccctctcttaccactcctattcaacacaatattggaagttttgtccagggcaatcagccaagagaaagaaagaaaggatattcaaataggaagagaggaaatcaaattatctttgtttgcagatgacatgatcctatatctagaaaaccccattgtcttgacccaaaagcttcttaaactgataagcaactttagcaaagtctcaggatacaaaatcaatgtgcaaaaattgctagcatttttatacaccacaacaggcaagcacagagccaaatcatgaatgaactcccattcacaattgctacaaacagaataaaatacctaagaatacagctaacaagagaagtgaagacctcttcaaggagaactacaaaccgctgtttaaggaaatcagagaggacacaaacaaatggaaaaaaattccatgctcatggataggaagaatcaatattgtgaaaatggccatactgctcaaagtaatttatagattcaatgctatttccattaaactgccattgacattcttcacagaattagaaaaaactattttaaaattcatatgaaaccaaaaaagagcccatatagccaagacaatcctaagcaaaaagaacaaagctagaggcatcaccctacccaacttcaaactatactacaagactacagtaaccaaaaactgcatggtactactgtacaagaacagacacatagaccaatggaacagaatagagaacccagaaataaggccacacacctacaaccatctgatcttcaacaaacatgacaaaaacaagcaatggggaaaagatttcctatttaataaatggtgctgggagaactggctagccatatgcagaaatttgaaactggaccccttccttacaccttatacaaaaattaactcaagatggattaaagacttagatgtaaaacccgaaactacaaaaaccctagaagaaaacctagggaataccattcaggacataggcacagggaaagattacatgacaaaaatattgaaagcaattgcaacgaaaggaaaagttgacaaatgggatctaattaaacagtttctgcacagcaaaagaagctatcatcatattgaatagacaacctacagaatgagaaaaataattgcaatttatttatctgacaaaggtttagtatctagagtctataaggaacttaaatttacaagaaaaaaaaaaccccattaaaaagtgggcaaaggacatgaacagacacttctcaaaagaagacattcatgtggccaataaacatacgagaaaaagctcaacatcactgatcattacagaaatgtaaatcaaaaccacaatgagataccatttcacaccagtcagaatggcaattattaaaaagccaagaaacaacagatgctggcaagactgtgaagaaaaagggatgcttttacaccattggtgggagtgtaaattaattcaaccattgtggaagatagtgtggcaatttctcaaagatctagaagcaaaaataccatttgacccagcaatcccattactgggtatatacccaaaggaatataagtcattctattatgaagatacatgcatgcatatgttcactgcagcactattcacaatagcaatgacatagaatcaacccaaatgcccatcgatgatagactggataaagaaaatgtggtacatatacaccatggaatcctatgcagccataaaatggaatgagatcatgtcatttgcagggacatggatgaagctggaaggcttatcctcagcaaactaacacaggaacagaaaatcaaataccacatgttctcactgataagtgggagctgaatgatgagaacacatggacacatagtgggagataacacacactgaggcctgttgggggtaggggtgggtgaggaagagcatcacggagaatagctaatggatgctgggcttaatacctaggtgatgggttgatctgtgcagcaaaccaccacggcacacgtttacctatgtaacaaacctgcactttctgcacatgtatcccggaacttaaaataacagttcaagaaaaaaaaaatccgtttaccttgcctgttacagataattttttaaaaataccaaggatagccgggtgcggtggctcacacctataatcccagcactttggaaggctgaagtgggtggatcacctgaggtcaggagttcaacaccagataggccaacatggtgaaaccctgtctctactaaaaatacaaaaattagccaggcatggtggcgggtgcctgtaatcccaactacttaggaggctgaggcaggagaatcgcttgaacctctgaggcaaaggttgcagtgagctgagattgcgccattgcacttcagccggggtgacaagagtgaaactccatctcaaaaaaaataaataaataataaaaatgaaatgccaaggacagagcacaatattaaaagtaagagattcctaagatttgtagaacagcaatgatgccatagtgtggtatatctttatttagtgcagatttggtaaccttcagatgatctccaaatcaccacttagctatgctatttctggagtaagtcttgtaaaatagataaatttctatcatagttgttaattataatattaactttattaaacaggaaaaatattaaatataagatattctaagcaaagtcagagagggtgagagaagggaaatttttcactcctaagaaaagataaagatagaaatctttaaatttgactagctgaattgagtgaaaaatttcatgtctaaactagagctgagtgtggcaaattgcaaaccaaagagactgatttttgcctccagagacattgtgcctgcaattctgtataaattcctctggatgctatagtgtgtctgacatatgtaagtggctgagtttttgtttttctctagagttaataattgaagaattgtaagttgaaatcatacaagctcaatattgtctatgaagtacatttattattaaaacaatagtgtaaacgtgaagcaaattagactctaaatgtgatttcaaggaataaaatactaaccacagtgaggacaaagaagaataaggtgttttaacatcttcctcagttgttttccctgggattggtggattctcacctggcttcaccttggcctgcttccttcctctcacagtctgaagttctttgcacttcagatgtgccagctctccttgctgctgctttgaggcttgacagccaaatggcaagtaattccctttaaactgaagattttcagctgctatacttggctttcttttcttggtagcctaatttagctctttttttttctttggcgatggagttttgctcttgtcacccaggctggagtgcaatggccgatctcagctcactgcagcctccagctcccaggttcaagcgattcttatgcctcagcctcctgagtagctggggttacaggtgcctgccatcacacctagctaatttttgtattttttgtagaaatggggttttgccatgctggccaggctggccttgaactcctgacctcaggtgagtcgcctgcctcagcctcccaaagtgctgttattacaggtgtgaaccaccgcacctggccataatttaatggtttttactaaaatagtcatatgatcagagtctgtttccatgtgtttctccaatggtactttttttttttttcttttttttgagatggagtctagccctgtagcccaggctggagtgcagtggcatgatcttggctcactgcaacctccacctctagggtttaagtgattctcctgcctcagcctcctgagtagctgggactataggtgcacgccaccacatccggttaattcgtactttagaactgatactaaactcatgtggcattcatgtagcctgaaattgtcctccttctttttgcttctacccagacacagggctgtctttgccattactcctgactccttctttttagcacttgcttgatgtaacaatcaccacgtatgtacatgtccttcaccccaggagactctttcaaacaacaggttgggttttttcttgttctgtttttggtttctgccatacccgggttgacaggagggaagacatcaaaagagacattatttttcacaatatactcataacaaaaagaagaaaagaacactgtcatcactgaatacaaaaaattatgtgaatttcctgtgtacattttttttcttttggtggaattttttttttttgagatggagtctcactctgtcgcccaggctggagtgcagtggcgcgatctgggctcactgcaagttctgcctcccgggttcacgccattctcctgcctcagcctcccaaatagctgggactacaggcacccgccaccatgccgggctaattttttgtatttttagtagagacggggtttcaccgcgttagccaggatggtctcggtctcctgacctcgtgatctgcctgtctataccataaggccagtagcttatgtaacaagagactactgggtacaaattaatgttcagcagttttattgacactaattttttataattagaattacattaatctcaatacagtaattaagtccagaattttgatgttattcaattttgttacaaataatttggaatgttcgattattcaaaatactgcttatgatttaagcatgtggatgaatgtttttcacagccaaaacttagtaacgctattcaagggcaagaagctattaagtagtcagaaatttgaaataaattattgcttgatttcaggtgtctgaaacaatagaatcacaaatacatattgaacttctcagatggtaatgcacttattactgtttagtgaaaaaggaaggaacgagagaaagaagaaaggagagaagggaggaagagaaggaagaaataaggaaaagaaggaaaaaaggaaaggaagaaagaagtaaaagaaagaaggaaaaaaggaaagaaaaagaaaggaaggaaggaaggagggaagaaaggaaggagggaaagaaggtaggaaggaaggaaggataagaaaagcatgttcttctagtgacggctttatgtaatgaaaaataattcttctgggctgggcttggtggcctgcagtcctagcactttaggaggcccaaggcgggaggattgcttgagctcaggagttcaagaccagcttgggcaacacagcaaaaccttatctctactaaaattccaaaaaaatttagtcagatatggtggtgtgtgtctgtagtctcagctacttggtggggggctgaggccagtggatcgcttgagcctgggagattgagactgcagtgagctatcatcatgccactgcactccaacctgggtgacagagcaagaccctgactcaagaaaagaaaaaaaaagaaattattctgtaacattatcttgtaatgttcatgtgatagtactacctgcattttaatctaattgtttatttaattgtctaccttcactcaattacaatgtttgtataggcagggaatcatgcttttcttgcttattcttgtaatccctaacacaatgcttggcatagagaaaattgctatatatctctatctctctattcactgaatgatgtccgttcctctgatatccctgaaattactatttgtttaatggaaaaaggacaacatgcatgactatatagagggggtctgttagtagagtctgccccaagtatccaacaatactaaaaaccaagtgagtgcctaccttggctcctccttcctaactcccttgaaatctcagcctttcgaatctttggcatgctgatggtaaagaaaggcgtgccaagaaaagaagggttgtgggtggggttttgcctaagattccctagagagctcttaaaaatacagactcccaggccccagtccatgagcttctgtttagaagtgacgcccagagaatcactattttaaaggctcccagaggattcagtgttcagcctgggttgaaaaacaattggtctagctggtcaaatcaacctactttagttgatttgatcacaagctcccaagcaggaacagtggtagtgtggctgactcacattaccagagtataaggaaatgcccacaattaaagctctacccttgccccaacaatgtggtccaataaatgtccacattttttatcctgaccactctggtggaggagagactgggagtgaaggaagggatggagggagtgatgaagaacagaccttgactttgtggttagagtcaaaaacattcattgagccatcattaaataggtacttgttgaggacctactgtaggccaggtaccaagccctgtgaataaagcagtgaaaaagaccagccaaatccctgccttcacagtgataactatattctaggggccaagacagagaatagacaaatggttatatcaatgtcattgatatcaatggatagtatgagaagaaaagtaaagcagtgtcaagtagagtgaagggggcagagtaagggtgagacaggttggctggggaaacagctctgagcagatgatgcttgagttgagacctggatgaagagaaggagtaatggtaggacccatgtgagagctgggggaacatcaggggaaatagctcctgagttgaggatgctcttggcatgttcaaaattagcaagaaagtccttgggttgagaatgaacatatggtgtagggcctcagaggccaggggagtctaggatttgtctcaagtgtgatacaaagcttttggagaatagtgagcagaagatggattgatctaattttttttaaatattgctctgactaatatagaggatatagtcaatatatatcctgatagtaaggaaaatggactacagggactaagattagaagaaggaccatgatttgggaggccattgcatggtccatgtagttgagagtagcttagattaggattatagccatggaggagggagaaacagtaagatgtgggatatatttgaaagcaggattggcaaagacttgctgatgcattcagtgttgggtgtaagaaaaagagaagattcacctgggttgattatagtattaagttcctgtaaactgaatcctgaatgattaaatactgtggcatacatggtaagccctcaataaatgttggctgaaacatccaactgagagtgttaaatagaccattgaacattaagtctgcagctcagggaaaggacagagctggagatatacatttggggtcaccagcgtatggtgggatttaaaaccattggactagatgaaatcaagggagtatggagtgagaatagacagctgagagtgaaattccagagcatttcaacatggagactgagagccaaagaggagaacccagaagaaaagactgagagggaaaggtccatgagattggaagaaattttggagcatggcaagacctggaagccaagtgaagaaagtgttttaaggtgggaatcgactaaaatattgttgacaagtattcaaaaacagtggagtatgggaatgaccattggaggtcgtgggtgacctttttaagccctgagctggaaatctgtaggaggttcccctggcatttcttcaagtcacttgctctttcttggaggaatctcttagtcttggcttcctcttctttttcacttttcctcttgctcctctctcttcttcatagcttttcattatcttgctcattctgtgaagcaagtaactaactctgcctgcctttaaaactgaagaagttttatgttaaagactagccccattcaggaatcatgagctatgctttctgcaacaataatacttacttgctaatcactcaggctattatataaatgccacttatatgaatacattgagaggtgggcatgaaaatggccattatttacataaataaaatgttttaaaattacatgtgaatttcacatgataaactagagtttaagatgccaatagctcttgaattataattttaggagagagaatgctgcagtttggaaagtggtgcttggcatcaacaatctagaccatccatcagtgttcatgcagacacgctttgtgaagaccatcatcctgcatccccgctacagtcgagcagtggtggactatgacatcagcatcgttgagctgagtgaagacatcagtgagactggctacgtccggcctgtctgcttgcccaacccggagcagtggctagagcctgacacgtactgctatatcacaggctggggccacatgggcaataaaagtaagccagtgtattagtccattctcatgctgctataagcacatacctgagagtgggtaatttataaaggaaagaagtttaattgattcacagttctgcagggatggggaggcctcaggaaacctacaatcatggcggaaggggaagcaaacatgtccttcttcacatggcagcagcaaggagaagtactgagcaaaagggggaaaagccccttataaaaccatcagacctcgtgagaactcactatcaagagggtaactgccccccatgtttcaattacctcccaccagatccctcccattacacgtggagattatgggaactacaattcaagatgagatttgggtgggaacacagccaaaccatatcagccaggatcttcaggagcctgagaaacattgtgttcctcagttgggaggctgaggtgggaggatttcttgagcctggaaggtggaggctgcagtgagccaagatctcaccactgcctgggtaacagaatgagacccagtacccagacccaaaagctaggtagcttttggccgtaatttcccattttctcttacaaaaatatagccacaaatggtaaatacttagcgatgtgtcacacttcatctgctgtgcaaatcatagacattaataatgaaccatggcatttaaaatggccaagctcagatgcaatctcaaaaatccctctccacacttcagaatctctctctgggagcttactattaatgttttggagcttccttgtggcaggaggagacctgtcactgaactgtgctttggactctctctatctgcctgcagatagcccaatgatagagacagtcactgggaatctctgcagtcaagctgcatggtcatatttccaattctatgttgtgatttggtcttatcaacatctgtagtacaaactataaatccttcaagaaagtatattgatttgctatttgactatttaaattgattaaaatagtttggctctgtagatgacttaacatataaaacacatagaaatttaaaatgtgtactctgtatttactctaaacccctataatggactctctcattcagtttgacctactttagaaataataattgtttgtttgtttatttgtttgtttttgagacggagtctcactctgtcacccaggctggaatgcagtggcacaatctcggctcactgcaacctccacctcccaggttcaagtgattctcctgcctcagcctcccgagtagctgggattacagacatgtgccatgacgcctggctaattttgttttttgtatttttagtgagacggggtttcaccatgttggccaagctagtttcaaactcctgacctcaggtgatccacccacctgaaacttaaaaaaaaaaaactgtaagtgctgcctactctgtccatatcaagtataatgccatggctttcaagaataataatgtatattggcattctgttattggccttagaaattgtatatttgaaggaattttttcttaaaatttagtcagataaggtttgacttacattgagtttcttttctatttcatcaattacagaacagaaaggaaattcaataggcagaagtcaatgactttttcaaaaaaactcacatgtaacaattttgaaggcaatgttagacatgctgtcaccactcctatgcatctgttttttttcaaagctatgattaattctgtaatttaagagcagactatgcttgatattgtttctgcttatattcctcctacaatatccatattgaactcagagcaatagtgcaacataacgcacactccacacatgtagtatagcatgaattgagcccaggagttcaagaccagcctgggcaacatggtggaactctgtctctacaaaaaaaaaattagcttggcatgggggtgtgtgcctgtagtcccagctacttgggaggctgaggtgggaggatttcttgagccttgaaggtggaggctgcagtgagccaaggatttcttgagccaaggtggaggctgcagtaagcaagtgaccactgcctgggtgacagaatgagaccctgtctcaaaaaaaaaaaaaagatctgctgaattcagtcagaaagacctgactgatctgactgtataactttcaagcttactataaaatggaaaaaaatagcaactacctaactcacaggagtattgtaaagattaaaggcaatgagacccactagtgcccaataaatgttagctattgttcttattcttttgacaacctgtgaaacatccactgtctgcatcacattgattttcctaaaaatggctctttcttccaataaggtacccagtagtgcttcaccatcactgtttaaaagaagaacagtgtgtataattttgcagaatggctaaacagtgaaagattcatgctgtcttgcttcaagaaatccattgtcattcttcaagaacttttaagcaagatggaattcacatattctctctgtcaataccaagggatggctttgtgcttttcgatatctctctgtcatatcctctaggattagaggttcttacatcaagtaatggctgctggggcacatattgaggcatattcttttcatcaagaataggacaacccttccctgttagattaaacaggttttctctactttagcagagcaggactatcatgctgagttgacgccgagctggcagcctcctatctggcagccagcagagctctggcttgatttttttcttttctttgtagtagctattgttttggttgtagcatatggtaaggatgaaccaacttacttaaccagtctaggccttggtttacccattaataaaataaaggagtttcaccggataattgctatgaatgcttctaactagaaaattctgattccaaaccagccatgtctttaaaatggcatttcaagtaaagaatatgcctctcttggtataaaaatatttatattatatttgcatttcatatttggctagcctcactagcctcacttttgagtcattttatcatcatatatatattcttattttttaaaaattcagtgccatttaagctgcaagagggagaggtccgcattatttctctggaacattgtcagtcctactttgacatgaagaccatcaccactcggatgatatgtgctggctatgagtctggcacagttgattcatgcatggtaagttgctttctggttaccaaggagattcagttcaacaataacttcagtggattcctataaactcattattacgtatggccctttggaaacattttttgaaaatcatttgttgccaaatgtttaattattaacagcacattttcctgcagctggtacacaagcaatccccacaattacacccatcctctttattcagggtgccttctactgtctcatctactatatggggaacatcacccttgttcagcaacaggagaaaaacaatttttcctgttcatctcattcaaccattttagtggctaggataaatgaggttctaagaggagctagtagtaaccatggcttccacctggctgccctggggaagcagggaaggcatgaaaggacattgtcagccattagggtgatggcaggaagccacacatcaacaccccaacttccagggtgtgagacaggactacctctgtctcaggggtcatcacactggtgttgtctgggccctcacttgattgccagcatgtcctcaaatgtcactgaactcaacctttagatactcaggattcatggccatgagagtttgcagaacatattaacataatagtgtagaggtgcctttttatttttacttaatagacacacatcgaacattatactggactggctcccaggaaaggagggaaaagtgcaagtgctcaaataagcttgtaacaaaaactggggaagacagttattatactatgctgctgtgaagcacctttaattgggagtaaattgctccctacagtttagtaatgaagaaaagatacaacagtgctcttaagtactaactcaatttaaataaactatatttttgatgatccattttagaatggaaaaatcagggtattgaaaatggccctgtggtgattccttagatagttgtcatgggaaagagggaggcagacagctcccttggcatttcgctgagaccaccctcctttctgcttcatggccacaagtcatcctgctgacgtggatggtggtaaaggaatccctcccttctctacaggaggactgggtttgatttcccaggcccaaaataaagtgttgtaggaggcagcatgatgtgggtgtggggcacaggatttgaagcctgaaatatctgggttggaattcatctctgccagtgagaccagtataacccggggaagttatctaacctctctagatagctttctcatgagtaaaatgggactaattctgtccatgaggattaactaagtgaatgtatttggaagcccatatctttcacatatctgtatatgatatctggcacatacttagacattcaatgaatagtaattacaccaatattaacagctatcaatttagtgcttattatgtttcgggctctctgcaaaacgctttctaataactcatttaattatcacaatcaacccatatggcagtgtctttattttccctaaacagatcaagaatacaggaggttaagtaatttgccccaaatcagccagcatgaaggtggtagactgaggacatgaaaccagtcagtctggcagcaatgattaatataactacatttcttcctctctccaatgtcatttggaggtttaccaaaaactagcacctcttggcacatgttcaagatcatctcttggcagttgctaaaggaggggaagggagatgattccttgacagagagctgaaggcccacagacacaggcatgggcatgttcttatcatgatgcctaataggaaccaggtcttgccgacttctttagtagtgggagttcagtggtgtatactgagttcagtggaagttcatttagtactgggtatactaaatgcataccagatattctctaacacaacttcaggtagaaaaccaaacaaaacctactttttactatatcaggagcaaatttttctacttagacctctattatatgacagatattattttccttaattgtatcaacaggacataatgaagcgtgagttactccgtgacaatctataaacctgaatactgaatactgaagccaaatataaatgttggtttcaagcccaatattacaaagaggaccaaaagaacagaccagatcagttgtgcctttagctgtagtctccctttcatttttaattgcttgcttttcacctttcattttgcacttaatggggtgcctacctgactcactaagcctaactcaaaacccacatctcaggaaggcattttttattcctctccacctggaagtcatcactcattcctttgacctcctctttctagccattagattttgctttcatgtggttatccttgttacccaagctgacttttggctgttctgggacaaaaacagtgccttattcgtttgtttatacactagcacagaactttgcaaagagtagatgctaaataattattttactaaatgtctgatctggaagtgaaaatgtgctgacattctaaacacattccattttaatcaccctctgacataatagttccacttcaatagctgagcatcttatttattttatataaggagagatcaagaatgaaataccctatgcatatgaaatgtgtgaaaacaaatttgtgaaaataatttgtgaaatgtttccaggaaatttttctttttcgtctaagcattatatacatgtaacaaagaaattttgctttaaaaaaattcaattaggctcttaggcagaaaaattcagctccttgcaagttctatgcttatgattttggcttagggtattggaaagttacaaatttaaagatcatcacttacacaaaagcatacagcacaatcaaaattttaatctctttcttcttcttttttttttttttttgagatggagtttcactctgtctcccaggctggagtgcagtggtgtgatctcagctcactgcaacctccaactcctgggttcaagggattctcctgcctcagcctccagcgtagctgggattacaggtttccacaaccacacctggctaatttttgtattttgagtagagacagggtttcaccatgttgatcaagttggtctggaactcctgacctcaagtcatctgcctgcctcggcctcccaaagtgctgggattacaggtgtgagctagcacgccgggcctaatttctctttcatagcaataatattccctaatattcctaagaagcagggtagcctagtagttatagagttggaatcctgttaccagactgcctggattcaaatctagcctctgccaatgaataagttatttaacctgtgcttctgtttcatcatctccaaaacagatataataaataatataaactcttaggtattttgtaaagattaaatgagctaatatgtggaaaatgtttagaagaggatcaggaaacattagtcctatgttcttcaacaataccaagtaggaagaccatagatatgcttctaattttgaaagtcttgtaggtcaaggagtatttgtaaccttccacaatgaattcacgtatttactcttttattttccatgatatcagctcttcttttttgaggcagtgcagaatacacctttgttttcagatgtagcaagtattgctatctctaatgccatagcattttatcattaactatatttgggggaaaaactgaatatagttcaactggaatccttaaatatcatgaatgaaaatccctatatatatgaaataaaatacaggctattaatgattcattataattttaagtggtcttattttgtattcaactatgccaaattaaaaagtcctaagaactattaagaagtgtagtaagggaccccaaattgtgttatgcttaatgtattcattcacaaagcaagaatcttgaaaatagatattttagaatatgtttgcagtactgtgtgtgggggggatctttattccattttgggtactttccacagtcataagtcaagcttaaattagaatgaggtcaattttgaggtaattagttctgatactttttaaaaactttatgacatatttttataagtgcagaaaatgcctgaaaaaggtaatttcctgggggaaaaatataatttcttcccaagccactccacccttttaatgatcagagtttaagatgtttatttgaaagttctgtttttacagtggaaagcacaactcctccacaggctgacaaggaaagctttgttgaaactttccaagttggttaatctgggtttagctttatagtatcctcaggatagcatggacacacattactgccctgaaatgccagttcctaactcccatcgttacttattgcagggtgacagcggtgggcctcttgtttgtgagaagcctggaggacggtggacattatttggattaacttcatggggctccgtctgcttttccaaagtcctggggcctggcgtttatagtaatgtgtcatatttcgtcgaatggattaaaagacagatttacatccagacctttctcctaaactaattataaggatgatcagagacttttgccagctacactaaaagaaaatggccttcttgactgtgaagagctgcctgcagagagctgtacagaagcacttttcatggacagaaatgctcaatcgtgcactgcaaatttgcatgtttgttttggactaatttttttcaatttattttttcaccttcatttttctcttatttcaagttcaatgaaagactttacaaaagcaaacaaagcagactttgtccttttgccaggcctaaccatgactgcagcacaaaattatcgactctggcgagatttaaaatcaggtgctacagtaacaggttatggaatggtctcttttatcctatcacaaaaaaagacatagatatttaggctgattaattatctctaccagtttttgtttctcaagctcagtgcatagtggtaaatttcagtgttaacattggagacttgcttttctttttctttttttataccccacaattcttttttattacacttcgaattttagggtacacgagcacaacgtgcaggttagttacatatgtatacatgtgccatgttggtgtgctgaacccagtaactcgtcatttgatttattaaaagccaagataatttacatgtttaaagtatttactattacccccttctaatgtttgcataattctgagaactgataaaagacagcaataaaagaccagtgtcatccatttaggtagcaagacatattgaatgcaaagttctttagatatcaatattaacacttgacattattggaccccccattctggatgtatatcaagatcataattttatagaagagtctctatagaactgtcctcatagctgggtttgttcaggatatatgagttggctgattgagactgcaacaactacatctatatttatgggcaatattttgttttacttatgtggcaaagaactggatattaaactttgcaaaagagaatttagatgagagatgcaattttttaaaaagaaaattaatttgcatccctcgtttaattaaatttatttttcagttttcttgcgttcatccataccaacaaagtcataaagagcatattttagagcacagtaagactttgcatggagtaaaacattttgtaattttcctcaaaagatgtttaatatctggtttcttctcattggtaattaaaattttagaaatgatttttagctctaggccactttacgcaactcaatttctgaagcaattagtggtaaaaagtatttttccccactaaaaaactttaaaacacaaatcttcatatatacttaatttaattagtcaggcatccattttgccttttaaacaactaggattccctactaacctccaccagcaacctggactgcctcagcattccaaatagatactacctgcaattttatacatgtatttttgtatcttttctgtgtgtaaacatagttgaaattcaaaaagttgtagcaatttctatactattcatctcctgtccttcagtttgtataaacctaaggagagtgtgaaatccagcaactgaattgtggtcacgattgtatgaaagttcaagaacatatgtcagttttgttacagttgtagctacatactcaatgtatcaacttttagcctgctcaacttaggctcagtgaaatatatatattatacttattttaaataattcttaatacaaataaaatggtaatggtctaa

SEQ ID NO: 34 - protein, 1042 aa, Homo sapiens
MKQSPALAPEERCRRAGSPKPVLRADDNNMGNGCSQKLATANLLRFLLLVLIPCICALVLLLVILLSYVGTLQKVYFKSNGSEPLVTDGEIQGSDVILTNTIYNQSTVVSTAHPDQHVPAWTTDASLPGDQSHRNTSACMNITHSQCQMLPYHATLTPLLSVVRNMEMEKFLKFFTYLHRLSCYQHIMLFGCTLAFPECIIDGDDSHGLLPCRSFCEAAKEGCESVLGMVNYSWPDFLRCSQFRNQTESSNVSRICFSPQQENGKQLLCGRGENFLCASGICIPGKLQCNGYNDCDDWSDEAHCNCSENLFHCHTGKCLNYSLVCDGYDDCGDLSDEQNCDCNPTTEHRCGDGRCIAMEWVCDGDHDCVDKSDEVNCSCHSQGLVECRNGQCIPSTFQCDGDEDCKDGSDEENCSVIQTSCQEGDQRCLYNPCLDSCGGSSLCDPNNSLNNCSQCEPITLELCMNLPYNSTSYPNYFGHRTQKEASISWESSLFPALVQTNCYKYLMFFSCTILVPKCDVNTGEHIPPCRALCEHSKERCESVLGIVGLQWPEDTDCSQFPEENSDNQTCLMPDEYVEECSPSHFKCRSGQCVLASRRCDGQADCDDDSDEENCGCKERDLWECPSNKQCLKHTVICDGFPDCPDYMDEKNCSFCQDDELECANHACVSRDLWCDGEADCSDSSDEWDCVTLSINVNSSSFLMVHRAATEHHVCADGWQEILSQLACKQMGLGEPSVTKLIQEQEKEPRWLTLHSNWESLNGTTLHELLVNGQSCESRSKISLLCTKQDCGRRPAARMNKRILGGRTSRPGRWPWQCSLQSEPSGHICGCVLIAKKWVLTVAHCFEGRENAAVWKVVLGINNLDHPSVFMQTRFVKTIILHPRYSRAVVDYDISIVELSEDISETGYVRPVCLPNPEQWLEPDTYCYITGWGHMGNKMPFKLQEGEVRIISLEHCQSYFDMKTITTRMICAGYESGTVDSCMGDSGGPLVCEKPGGRWTLFGLTSWGSVCFSKVLGPGVYSNVSYFVEWIKRQIYIQTFLLN

SEQ ID NO: 35 - DNA, 85634 bp, Homo sapiens
  CDS (68531)..(68660)
  CDS (77570)..(77724)
  CDS (79263)..(79401)
  CDS (81389)..(81591)
  CDS (81772)..(82222)
  CDS (83275)..(83519)
gcggagcgtgtgacgctgcggccgccgcggacctggggattaatgggaaaagttttggcaggagcgggagaattctgcggagcctgcgggacggcggcggtggcgccgtaggcagccgggacaggtcagtccgagacgagagaagcggtcaggcaagtggcggagggaagcgccgggcctgggccgaggcggccagcgggactggggcgcaaggcccggcggcggggaacggggtgcggggagctgccggggtccgcggacagcgtcacggcggcttcctgatgctccggcccgctccggtcagccgtcgtgcgttgccatgtaggcgccccgctgaccctgcgcccccccgcccttggacccccatagctgcttgagtgagtccgaaatacgggcctccttccaccctactctttgccccctcttgggcctggtggcttcgtcttctcccacttgtgagaaccccgtctcaggcccgggggcctctcccattcccctcccctgcctctgacctcttccttcacccgtttctggtgttcctgaatccactgccctatctagcgagagtcttctctgggatcttttcctctgtccccctcgttatccttgtctcctgccttcatcctcccatccttgctctctcaggctttactctctctccccatccctgtccccttcttatctgtggtctgatccctcctagtattatgggtccccatcctcttccccagggtgttcctaggctttttccaactccgtgcctgcagtccctgtctccctaagactctcaccttggttccctgagaggccctgtttttgctcctttttccgatttccttcgtatcaattctgtcccctacattcctgtcgcccacctccttttctctccctgttcctttcccctgcttcagggagaagccttagctccacactctactctactttcacttgacctgcagttgacataaccatggggtgggggtggaggtgttcagaccttgatcgaattaagaggctgattgactaaaggaaataacagattgtgtgggagaatgtacgtgggtgttgcatcagagatgatgtccaatttgtaggccattcttcttatctcagctttaatacttcccctttatggggctgttgacttccaggaacccttgggggagacggcgctgagctggatgtgtgccacgggtagccggaggctttgtccaattcttttccccttccaggaaccggggttttgtgtctttccactctggatgtgtggaatacacttataccatgataccccagcctctctctgccctcactcccaccctccaccctgtgctccatccgaaaggactaagagaattctccagaagctgtgctccagaaaatacttgtggtcctcaaccttttttctgtgtactggctccagaacttttttttttcccgtttgagttttgaaatagattgctggcctgatagccctggggctggcgggcatctgtccccttttattattggtggcttgaaacagctgctgattttctctcatatctctttgacaatctttggccaactgaatgtgcctctgatgttggtcactgaacatgttctcttggagtctcttctccctcttttttctttgttcttttctgaatctagggaatccaaattgtccctctttttccctgggagcttaatttcctctgtatccaggaggaacggcaatcccagagctctgttccctttgcccaggcatagtatgaggtatcagattgataactaccctggtgggctgtggggctgcagtagttagaccttgtcaggaacttgagcagacacatctgcttccagtcacatagatcatcttctctggggcttgagagcccaccaccttccatgtgtgtctggatgtttaaccttaccaagcagaagattctcgtcatatccttcagtttgagctcctttatttggcgttggttctctaaagaagtattcaagaaataacatatcctttgtttctacccagtctgatcttggaggattctgaaagcgtgacccactctcatgtttagaaatgaaggctcattgtttcacctggccccaggtttctaggggctcctcttttgatgattgtgctgtctttgagccagattggacatgggagttggcaacctttaggagctgcggtggagagccaaaggaaccagcttgaccagactttaaagttttgtaatcctcttgtacactgttttctgtgaaagcaataggattgtggatggcctgttgttgagccagtcccttctccactgacccccagaccccctttgcagcacttgcaaagatttgggtagactggaccagagggttttccttgttcctgtgaatagcatctctccagggttttagtggatcattctaaagaggtagaggtcaagtgttggacagatttttagtctagtctctggctttcaaggactcctccttactcttttgagcagtttgttacttctggccgtgcttaccccttagtagtgctctctgctgtggtggcaggtgagagatttgagaacaggtcaaggccagtccttgtggagcagcttgggcaccagcagccctagatggatagcttcttgcagtttgtccactctcattttctgagaaggtagtcatgattgtcaattaccaaattccttccccattcagtgatttttgcagagtctgggtctggattttctttccttctttcttttctgacacaaggttttgttctattgcccaggctggagtgcagtggtgctatcatagtgcactgtaacctcgaactcctgggctcaagggatcttcctgcttcagcctccagagtagcggggactacaggtgcacaccaccacactcagctaattaaaaaacaatttttttgtaaagacaggctctcacaatgtctcgaactcctggcctcaagcagtcctcctcaccttggcctctcagagcactgagattacactgactgctcgttcaggtgcctttctccttgcctcttcaccatggccttcttgtgtgatatatgccttaacccattcaggaagaattgctcctactcagcctttcaacccgacctgtggtcccttagacgccttcccttagggcctggtaagaggatagacagtgtagagcactagcctgggaagccattaggcctctgctttgggcctacagctgtcctgactgttgtgcaagctgtcttcagggcctgcagattctggcacatcctgggatagtgcagctcctctctctcaggagttggacctgtcacttttttttcgttttttttttttttttttttgagatggagtctcgctctgtcgcccaggctggagtgcagtggtgcgatcttggctcactgcaagctccatctcccaggttcacgccattcttctgcctcagcctcctgagtagctgggactacaggcgcccgccaccacgcctggctcatttttttttgtagttttagtagagacagggtttcaccgtgttagtcgagatggtctcgatttcctgacctcgtgatctgcccgcctcagcctcccaaagtgctgggattacaggcgtgagccaccacaaccagcctggacctgtcacttctaagggcttcagctatatcctgtccctgaggcccacctccctgagtgctctctgcaggctgggaagctgaacagtggtgccttgctccagtgcctctgaagggcttggaaattgcaggacacagctttactgctcagcattgcccacactggaaacattctcttcctccctacccaggtctctgtgggctttgtccgttctgccaggcccttgcttatatgatgtcagaagccctgtgcccggtgccattgtcaatgccatgtcccagattacctaatggctgcttcttggagatggtttggtgtccatgcacatttttctctgccgttggagccagggtgaggagctgcttgcaacagctggattccagggtgtcagaggagcccttggagcttgccttgagcctggcagggagaacatggccccttgcatcaggtttcagacatatgggtcttcttccttggcagatggctcctagccttcataactcagcaggctggtgattggcatgtgactccagttcattctgcaggggctttggtgaaggcatcaactatgactcaggacatcttcatttatgagcttctacccagctcccttcttaccttgcctgcgccttctgcgccgacctgataaaatcagcaaagccagtgtctgcttacttgggagtgagcagactccttccaggattggggaaatatttgctgactcaggctcagaatcacatctcagggtggtgtgtaagggaccgacgaggagccagattaccttaggaacactctttgagttacggtgggtataacttattagagttgctttgagggcccctggcacctgtcagctaaagctgttggggttttttctatcctgcagtgttgtacagtgttttgggcatgcacgtgatactcacacagtggcttctgctcaccaacagatgaagacagatgcaccaacgaggtaatcccattttctttactcaggggtctctgaccaccactgacacaggatccagatttaagatcctgaccttgaagatgaaataatttcactagggcttattcccagattccaggttcctgtcacagcatctggtaccagttgcttatgcatagtataggcatttattaagtaattattgaaagtctatggcttacatagttttttcaggagcatggagattcccacctttgcgcccattaaaagataaactccacagggcagggagttgttttgctgcctgttgtgtctaggatagtgcctggcacagaggagataatgaataaatttttgttgaatgagtaaatgaacgaactttcgtctttgcctatatgggtacctagggtgccaggccacaaagatggtgtccatcattctctcttattagggggcaaatatatatatatatatatattttgtttgtttgtttgtttttgagacgaagtcttgctcttgtcccccagactggagtgcaatggcgtgatcttggctcactgccacctccttctcctgggttcaagtgcttctcctgtctcagcctcccaagtagctgggattataggcacctgccaccacgcccggctaatttttgtatttttagtagagatggggtttcaccatgttggccaggctggtctggaactcctgacctcaggtgatccgcccgcctcagcctcccaaagtgctgggattacaggcgtgagccaccgcacctggccttttttttttttttttgagatggagtttcgctcttgttgtccaggctggagtgcaatgccgtgatctcggctcactgcaacctccgcctcttaggttcaagcgattctcctacctcagcctcctgagtagctgagattacaggcatgcgccaccacatctggctaaattttgtatttttagtagagacggggtttcaccatgttagccagactggtctcaaactcctgatgtcagatgatctacccgcctcagcctcccagagtgctgggattacagatgtgagccactgtgcccagccgggaacaaatatttttaagtgccaactatgtgccaggcacttgggaaatgataatagtaaaaaacagatccaatctctgcctcatgggtctgtggtttgctggtatatatgagagctggccataacacacagaattgtttcttccatctctgcaggggtaggaggttctcaccaagagtctgaacaatgctctgggttcccattgctgtttccatgttctcaggatgcctggcaggttttataaactctcagaagtggagctccagggaatacaatgttcattgtcctatttggaaggctgggttgttgtgggtccctgctgggggccggggaaacgtgggcctcctgcctgatttgttttaatctctgaagttcagtggttccagtagctgtttgtgggcttcacttccccttctctgcctttaacaccctgcaggttttcctgttgtcagacagggtggtgagtccctgtgtctctctgtctgtgggggtcaggttgtttgtagatctttcaggaaggtcctgggtggggggccctcctgctttcaaacccataccaagtgctttcctctgaagggaatgtgagggaggaagaaggggggagtttcagagacttctgaggttccccaagagggaagaggtcaaagtacctcctgagcggggagagctactgagttgaactgatttgctttgccatttgctttagcagcagccaggcccagtggcagcaattgtacgtgcatttccaggggtcagttgtccagttcatccctgagccttgagctcccagtcgcaggtaggaacttctcttctcctttctttttttttttttttttgagacggagtctcgctctgtcacccaggctggagtgcagtggcgcgatctaggctcactgcaagctctgcctcctgggttcacaccattctcctgcctaagcctcctgagtagctgggactacaggcgcccgccaccacgcccggctaattttttgtatttttagtagagacggggtttcaccgtgttagccaagatggtctcgatctcctgacctcgtgatccaccggcctcggcctcccaaagtgctgggattacaggcgtgagccaccgcgcccggcctcttctttctttcttgattgggtactgctatatcacctaggaccaggggtgtgtccaatcttttggcatccctgggccacattggaagaagaattattatcttgggctatacataaaatacactaacactaacaatagtgatgagctaaaaataaaaatggcaaaagaatctcatgttttaataaagtttacgtatttgcgttgggatgcattcagagctctcctgggctgcatgcagtcatgggccatgggttggataagcttggcctccctaggcagtcctctcaccacagcctcccaagtagctgggactacaggtgcacaccactgtgcctggctaagttttttttttgtttgtttttgtttttttttaatttaatgggtacatagtagtaggtgtatatttctttttttcttttcttttttgtttttttgagatggaatcttgctcttgtcacccaggctggagagcaatggcacaatcttggctccctgtaacctccacctcctgggttcaagcgattctcctgcctcagcctcccaagtagctcagattacaggcgcccgccaccacgcccagctaatttttgtatttttagtagagatggggttttgtcatgttggccaggctggtctcgaactcctgacctcaagtgatctgcctgcctcagcctcccaaaatgttgggattacaggcatgagctaccacacccggccttgtatgtcttcttttgagaaatgtctattaaaatcttttgcccatccttttattagattattcgtttttttcctatagagttgtttgagctcgttatatattcttgttattaaccccttgtgaaatgggtagtttgcaaatattttctctcattctgtgggttgtctcttcactttgttgattgtttcctttgctgtgcagaaactgtttaatgtgatgtgatcccatttgaccatttttgctttggttgcctgtgcttgcggggtattgctcaagaaatttttgcccagaccagtgtcctggagattttctcctgttttcttgtagtactttcatggtttgaagtctcagatttaagtctttattttgatttggtttttgtggatggcaagaggtaggggtctagtttcattcatctccatatgaatatccagttttccaagcaccatttattgaagagactgtcttttcctcagtgtatgttcttggcacctttgtcaaaagtgagttcactgtagatgtgtggatttgtttctgggttctctattctgttccattggtctatgtgtcttttttttttttttttttttttctctgagacagagttttgctctgttgcccaggatggagtgcagtggcgtggcgtgatgttggctcactgcagcctctgcctcccgtgttcgagcagttctcctgcctcagtctcccaagtagctgggattacaggcatgtgtcaccatgcctggctaattttttgtgtttttagtagagatggggtttcaccatgttggtcaggctggtcttgaactcctgacctcaggtgatctgcccacctcggtctcccaaagtgctgggattacaggcatgagccaccgcgcctgggcgaaagatggcttattttgaagtcaactttagaatattataaaacagcattctcaaactttttggcctcaagatccctttagattctttttttgtttgtttgtttgtttttgttttttgagacggagtctctctctgtcacccaggctggagtgcagtggcacaatctcggcttactgcaagccccgcctcccgggttcatgccattctcctgcctcagcctcccgagtagctgggactacaggtgcccgccaccacgcccagctaattttttgtgtttttagtagagacggggtttcaccatgttagccaggatggtctcaatctcctgacctcgtgattcacccgcgtcggcctcccaaagtgctgggattacagatgtgagccactgcgccagtccctttagattcttaaaaattattgaagaccccaagggcttatgtttaccatgttagaagttataataggccgggcgggtgacattcgttaatatcaccactgatctcatttttaaaaagtctttaagtattgggaagctgtcgggctcacagtggtcaatacacgttttctaaatttgagttttctcttgaaagtttgatttttatcattggtaacatactgttggttcttttgtttgattttgtctgagatagcatctccctcagtcacccaggctggagtgcagtggtgcagtcatagctcacttgcagcctccaacttctgggctcaagtaatcctcctgcctcagcgtccagagtagctaggactacaggtatgtgctaccatgcccagctcattttaaaattttttgtaaagatggtgtcttgtgatcttgctacatcgaccaggctggtcttgaattcctggcctcaagtgatccatctgcctcagcctcccaaattactgggattataggcatgagccaccacacccagccttttttttttttttttttttttttgatatggggtctcactcttgcccaggcttgagtgcggtggcacagtcttggctcactgtatctagccttgacttccaggctcaagtgatcctttcatctcagcctcccaagtagctaagactacatgcatgcaccatcatgcccacctcattttttaacttgttgtagagatcaggtctccctgtgttgtccaggctggtctcaaactcctgagctcgagccattcattcctgccttggcctcccaaagtgctgggattaaaggcatgagccactgtgcccagccagttcttttttgttttgttttgttttgttttgagatgaagtctcactctgtcacccaggctagagtgcagtggtgtgatctcggctcactgcaacctccgcctcgtgggttcaagtgattcttctgcctcagcctcccaagtagctgggaccacaggcgcgcaccccaatgcccggctaatttttgtatttttttagtagagatggggtttcaccatattggtcaggccggtctcgaactcctgacctcatgatctgcccacctcagcctcccagagtgctgggattacaggcgtgagccaccgcgcccggccacaaagaatatttaaaagacagatatcaaaggtggagattttaataaagttagtttttatttattcatctaggacattcttaaattggcattttattgtctttcatggttctgtggattaactgggcccagctgggtggttcttgcttgggatatgtcatgttgctatagtcaaatgaagacggggcaggtgtcatctgaaggctcagctgggctgggtgtccacgctggcttaggcacatgggtggcacttgatgctgttgaatggagtgcgtatacatgacctctctatgtgccttgggcttctcatagcatgagagctgggttctgagcagaagcattcccaaaatgaatgtattgagagattcagaaagaaatgtcaatgtttctcatgtcctagccttggaagttacacagtgccacttcctctattcccttggtctcaggaccagttcagattcaaggagaggactacacaagggtgtgaatactaagaggcgtgattcactgaggagagaaacaggcctccttggagaccagctactacttttcagcatccttatgtgaggtaatgtggtcttgatacttccaagagaaaagcacatcttctcatgattttcattcctggaagctactgttagttaggaaattcctaataggttgatggaggacattgaatgctaggtgaaggaatttgtactctgttctttgggcaatgggggagccatcagtggttttggagcaaggagtggtggtgttaatattgcaaaaaggtagattaggaatggagatagagaggataggtaggggactgcagtggtctaaatgtaaggaaattcttcttcacattaaatctgagttcctctggttgcaatttaagtgtattgattttgatatttcagccacacagattaagcacccagagccagggtggaataacccatccctaccccatatccatttagggctgttgatgcacaggagagattaagagttcacaaactttagaaggcaactaaatttaggttttattgtcaaagcacataaaaagttaagcataaattattcaaaaataaaaagcaagaaaggtgaaacttcatttaacaccactaaccatgtttcaaatacgcttcagtttcagtattatagaagcaaggagtggagccagaggaaggaatggggaggacaaattagagaatggtaggaagagggacaaaagtaggggaagaaaggagtcaggaggggcacacagcagaaagaatttgaaggaggtcagattggagcaactacttgaagctgagagaaggctccgtatggggctaacatgttagcaaagagctggtgccttctgtgtttccctgaggcactggcttctgggttttagcatctggtatcctcaccctttctttaatacagacagtccccaacttatgatggttcaactttacagtgatgtaaaagccatacacggctgggcgcatggctcacgcctgtaatctcagcactttgggaggccgaggtgggaggatcacgaggtcaggagattgagaccatcctggctaacacagtgaaaccctgtctctactaaaaatacaaaaaattagctgggcgtggtggtgggcgcctgtagtcccagctacttgggaggctgaggcaggagaatggcatgaacccgggaggcggagcttgcagtgagccgagtgcatgccactgcattccagcctgggcgacagagcgagactccgtctcaaaaaaaaaaaaaaaaaaaaaagcgatacacattcaacagaagccccatcctttagtactcatacaaccattcttttttttttttttttgagatggcgtctcactcttgcccaggctgcagtgcagtggtgtgatctcggctcacagcaacctctgcctcccgggttaaagtgattctcctgcctcagcctcctgagtagctgggattataggcgactgccaccaggcctggctaatttttgaatttttagtagagataggatttcacaatgttggccaggctggtttctaactcctgaccaggtgacctgcccacctcggcctcccaaagtgctggaattacaggcatgagccaccgtgccccggttctcatacgaccattctgttttttcactttcagtacagtattcaattacatgagatattcaaaattgtaacataagctctgtgttagatgatgttgcccgtaggctcatggaaatgttctggcacatttgcagtaggctatgctaagtaagttatggtgttcggcaggttacatatattacatgcgtttttgacttgtgacgttttcaacatatgatgggtttgtccttataagttgaggaacatttgtagccatttcatcgtctgtgaagaggcctgagtggattttgtgctggagaccggtgtgactcagctccagtgttgactgaccttctaaccatgggcttgtgactgaatgtcctgagccttcattttcttccctgtgaggattaaaatgaacctcaggaaatgctggcttgtcctctttctgtcaagctgggttctgagggggtgagcccaggtaggagtgacttctgaaccagcccagatttacaggcttgggcatagggagcccagcctcagcctgggagcctcatcttccattaaatagctcctggcattcaggggagtgcgttgcagcaccccatttttttttcattgaagtcctgtcttccagccaggcacagtgaatcacttgaggccacgagtttgagaccagcctagccatcatggggaaaccccatctatactaaaaatacaaaaattatctgggcacggtggcgcacacctgtagtcccagcacaccagagttcaagaccagcctgggcaacatggcgaaaccccgtctctacaaaaaatacaaaaattatccaggcgtggtggtacatgcctgtagttcctactccttggggggctgaggtaggagaatcactcaagccgaggaggttgaggctgcagtgagccatatttgtaccactgtactccagcctgggtgacagagtaaggccctgtctgtaaaaaaaaaaaaaaaaaaaaaaaaaagtgctttcttcttcttcttctttttttttttttttttttttttttttttttgagacggagtctcgctttgttgcccaggctggagtgcagtggcgtgatctcggctcactgcaagctccgcctcccaggttcgcgccgttctcctgcctcagcctcccgagtagctgggactacaggcgcccgccaccactcctggctaattttttgtatttttggtagagacagggtttcacggtgttagccaggatggtctcgatctcctgaccttgtgatccgcccgtctcagcctcccaaagtgctgggattacagtcatgagccacgatgcccgacctctttcttatataatttttttttttaatcgggcagccctcagaatcacagcagattcagaaagactccccagaaaagttctttcactcctaacttctacccagcctcatggtcacctcagcagctctcctgagaccgttactaagttctccacagctaatggtaactcagcttggaaagagttctcttgtaggaggatgctgaagggaggttgccaagtggtgtgggaaactgcttcatgcttaagttcacttccatatcatgatactaaaaggtatctaacagctgattttcattgctttcatttgtgatctgctaggaccacttgatccttatcactgcttttggcacactcctcatccaagagttgatcgcagaggcagagttccttgccaccagtccagtggaagtacaagccaactttgctctccaaatggcagcagtagctgagcaggccgccctgcattctctcctcataaacatgctgttctcaagtttgtcagaatccagagctctctactcattacccccttttccaaacaagcaagcaaagcatgctcttcctttgtttcccttaattgcctaaaacatctccatgctcatagctgttgactctctttgcctcctagttcctgttcctctggtgtaggatttctcagccctagcactgtaaacatgttgggctggataatcatctcttgtatgggctgtttgtgcattgtaggatgttgagcagcatccctggcttctacacactaagtgccagtgacactcttctcccctccccagctgtaaaacccaaatgtctgcggacattgccaaatgtctcctagggggcaaaatcacccctggttgagagtcactgctctatcatttattcactaaatactgctggtcagctgggtccactggcgaacctcacatcaataaacctggtaatagaagcatattgttcttacattagaagtttactctcttcagttatctcactgggcccttgagggctttggggaggagtgatgggaaatggtttacaattaacagcatattccaatgaagaaagaaagcatatgatgtctgcacaacagaggagagtgtccacaatgtacagctcttccctggagcagttatgtttctcagggtgtgcttttccaagtcattttgtgtctggttagaagccaccttcccttagcatccagaggtgccatgtagactagggttggtcacagtgtgtagattgccattgacctgcccattcctagtgtttgacctggtggtcatggcactctgaccacatcagttttcctctccaagcccagatgggttctcagaaccctccaccccaagctgcactcatgagaggcggcacttctgccatcctgatctagagcttgttcatgtggtccagaccatttctttgcagccccctctcctgtgtaaaagcctttaggaaagtgcagagatcctgatggattccccttgaccctcagcacgcacatcctggtatgtagtgctcagcactccgttgggggcttcagactggagaagagaaaactgcccttccctttcaaggacatcctccaagggccagaatgctcagttccgtaaaattaactctccactgcctacttttttttttttttttttaagacagtctcactctgtgccccaggctggagcgcagtggtgtgatcttggctcactgcaacctccgcctcccgggttcaagcaattctcctacctcagccttccaagtagctgggattacaggcatgcgccacctcacccagctaatttttgtatttttagtagagacgggatttcactatcttggccaggctggtctcaaactcctgacctctagtgatccacttgcctcggcctcccaaagtgctagtattacagtcatgagccaccatgcctggcctgctgcctatttaaatagcaagcagttacagttaaagaaagaccctggcctggggacgctgccaaggctcctaatctgacacttctttcatgtggaccagggatctgaactgtgtttcttccaaacttttggagcttgcttccttggtggtaagctaaatagtggcccccaaaatatacccctttataacccctgtaacctgtgaatattatatgacataatggactttgcacatgtaattaaattaaggatcttgagatgaggggattatcctagattatctgggtggacccctaaatgcaatcccaagtgtccttatgagtgggggccagagagagagattggacacaggagaaggaggcaatgtgactactgcagcaagatgctacactgctggctttggaggtggaagagaaggccaaaaatgcaacgaacgtagctttggaagctggaaaaggcaaggaaactgttttcccttagaacctctggaggaagtgtggccctgccaacacactgattttagcccagtgaaactaattttgaatttctgacctctagaactgtaagagaataaatgtgttttgttttaagtcgctaagtttgtggtaatgtggtaatttgttacagtgcagtaggaaactaatacagggctcatctgcctccaggtacaagtggtggcttggctgatccctgttcttattttaaggcgtccctctcatggcacaaggagagcataggcccagcattttcctgaaccagtatttgaaacaatctgcactttgggggaacctgttggggagttcttggaagcaagagagaaagcctcatatggtacccgatccttgctttggaactctcccagcaccttcagtgatatcatgaacaaagagttctttcagaccagtgaggatgtaggattattaaaatctgattctaattccatcttcccctctcctcttccatttattcaataaatgtttattgtgtacctcctatgtgctaggcactggggatgaagggataaacaaagcagataaaaaatctcctgctctcgtggtaactgaggtgggggaagtggagggagccagagttaagtcaacagcatgtgagatggcttcagatgctctctagaaaactaagcagaaaggagggtagtggcagttccacatagagggccggggaaggtctcaccacgaaggtgacatttaagtggaaagaggagagtgaactattgtgggaagaatctcgcaggcagagggaaagcaagttccaaggccctgcactgggacacagctgaggtgttcaacgcatagcgaggaggccagcgtggctggacagagggagggaggagaccaggagatgaagttagagacgagattggtggccctgaagtgccataacagcttttactttgcttggcattttgccccttctttctcctctcctccccctcacaccacctcacgagttttaggcccatgttcctcagttcctttccatgggatatttatcccatcatacttagggactaccagcaggcaaacatagtcacttaaaaatattagaagagggggaaaaagcagcctcctctttctgaatgatgaaagcagttccatggcagtgttggcatggcactgtgtatctagcagtgcaggctggccattcaccgcgtagttctgggtggtttctgagaggttcccctccatggccttcttcagcccatgaggaagtccaacccccctggcccgctgtttctttccatttcacccctcttggtctccccagtgggactcccacagctgacttctatccccacctgtgtctaatcccctttccatggctgagccggtagataacctagtaacgatctgagtagaatatggctcccacatgttgaatgcattgtgctgatcactacatatatcactttgattcacacaacaaccctgagaggtaggaaccattgtaccccttttagagatgaggatactgaggctcagactggttaggaaaattgcctaaagttgcacagctaatgaatggcagagctgggatttgaacccaagtgattaaagcccatgtctttgatcactacatagcagggccttctaggaaggatggctggctggatctagttgttccagtttggaaagtacctgcttgactggccagactgctgttggcttcagaaaatagcagtctcttgttggtcactgagaagaggcaaaattttggcaggccttggggcctcctgcagagtctcattccaggtcagtggacagaggaggccctgagaatagtcgtgcatactggctccctggatctgctccaagacagtgagcagcccctagaaccacaagagactggccagccaagctgtgggcccggcctgtagggtggaaggaactcttaagagaaaaaaaaaatctctgctgtgattaatcaacagcttcagtctggtgaagtgaaaagagaaaagttggcccagatgtgcacatagggagagaaataagggagggaaattgcctttattcatgttctcccttaggccagtcgttaccccacggatgagatcaccttccttttacaccagcctgcaagaggtgtgtagtggtagtctcattttacagacaaggtgtaggatcagagaggttaactcgcccaagtcaaacagctaacaagtggtggaattggaatttgagccctgttcttctcagttcagtagccctgctgttcttgctgatgtcacctcagcatgggctctccaggtatgtgcaaatagttatgcaagtgttgcatccacaggcttgtgagcagaggctgaaagggagccagggctcttggtacttgccctctcaacatgggccctgcctaagctagcaggactcactatacccaaaccagcagtggcattatatttttctcttttcttgcaccttgccatccccgatttatttttagagagccttttctatttctgttcccatttcttggcttggatgcaggggctggggtgcagggatggcgctagaaatcagaagaggcaggcatagatggcatctcactggtggccttggctggtctctgggaactgtgcccatctgcctgccctgctggctcctcctcaggccagctgtaggccccagggatcatagagctcgggtagctagaggctgggagggcaggcgagacagagaaacagccacacttctcatttctttggcttctcagagggggatgagcttcctcctggaacagagaagggagtagctcactgcctgtttctcagggttaggttacggacttctagggaatatggggtagtgcttaagagccagactctgtgtggcatgggggtgataactgtagaccctccacctctggggattaaatgagctcatacatgtaaaggcacagaggaggcactcactgaatgatgattgtttcattagtgtctttagaccctcagcacccagcaccataggtggatgccagtcattattggttagaccaaacagaacttcaaggcagctgggcatggtggctcacacctgtaataccagcactttgggaggccaaggtgggagggtcacctgaggtcaggcatttgagatcaacctgggcaacgtagtgagacccagtgtctatttatttaaaaaaataaaataataataaaaaaagaaaaataactttaatgttatttttgtcgtcctcttcatctgaacattggcctgcgtaggtattaacctgagtccagtgattgtttgtggagccccacagggtacttcccagtgacagcagcctggagtgtgctcctgccagcccctgcctgggccctggaaaaggcagggcagtgcagcgaggaatcttctggcctaaggatgcctgtaaccaccaaaccttatgtttagttttacaccttgctgagggtctggcttttggatatgagctctggagtggtaggggtctgtgtcccatggggacaggtggttctgggtgttgggcacgaggtgatggaggaagggcctgccacttgcaagctgtttatctgactagtaataaacagtggatgacacctttaggaaactgtatttgggagctttgaaattaatcagatgccaccaatggcatttttaatttagttaaaaatgttttagttatataaataatgctcattcgttatagatgattagaaaatacagataagcactgaggagaaaaaagtaatatattatcacacataagtggctgctttgatatatgatttttttttcttacctaggttcttttcaaattgtgtatacctagttattttttctgtctttcgaaatgggatgctgtttaacatttagttttgtgacttgcctttcccatttttcaggtggttttgtggtgtctgcttgtcctccgacctcctctcccatttgtgggaaaggcatttggcctggagggaggcacttgggaagaactgtctggttgttccttgatgttattgccagacttgcagagggtagagaggtgcatgaagtcttactctgcctctccccatctgtgtctctccctgtccctgtccagcgccccatctgctctgcctactcaccactcctgccttttttttttttccttccatacaaatccagaaaaggataccacctccagtctgaaggtttctttctatggcttttagggatgaatctctcaggagtttagaaaaaaagatgcacagacagtatataggaagggtaatgccagggctgggggtgggggtcttgggaagagcaactgagaggagggcctgggtccctggtgctgtcttgagtcagtgagaagaagctgcgtgggtgatgggttggggcggggtaggcagcaggtgactgcagggacctctctgaaacagcaagcaagctggccaggaagacgcctggagaataaggggcccagataggggccagacataggggagaagaaaatgtgtctcagtggcacctgctcctccaccctggccccactctttccatgatctttccagagattctctctttttctgcctgatctgcttccctcacctggcagtgcccagccccagtagtttgacacatctggtatatctggctactgtgctctactgacacctgtgtggcagcagctgcacagcttcttggcatctccctgggcagtaggcagggatccgagcatagaggaagatgttccatgcatcagtaactcagattccgttccagaaacgcatctcaaagcaagggagaaaattgaagatggggtattttgtggggaacaagctatgccttcctgtcacttcttacagaataaaatggggtctctggcagtaggcaaggagaaggcctttctgagcactgagggtcagtggcttctcaggtcttttctgggccactttggcctgcacacaggttgggctaggaattcatgcttaaaagcaggctgatttccataggctgtgcgttcctgtgggcctgcctggatcatatctgttctgctgtgatcccaggcctggtgagacccactggcttcctgtacgtcccctcaaagcctgcgccaccgcctctcccttcaccactcccaagctataattaagttcccatgtgaaactgtatccctcagctgacacacgcttgtaactacagccctggccattggacggctcatctggggtgacttctggggctggtgcctcagcctccagacgctctccagtaggtctgagtaggtggtgtggacccaccaggaaagggtggatccagtgaggcgggggccaggccttgcccaagagtcagaaagtgggaagtcacgggggagatgaagggcgagtgagcagctagaaagtgccaggggacacaaaaatgggggagacaggcagccttttggggctggagggcatggacagggtgactgatgcctgagccacaggcagaatgtgagcagtttattttattttatattctacatatttttatagcataaaattaagatatagttcacataaccaaattcaccactttaaagtgtgtactttgatggtttttgtatattaactgtgttttatatattatattaaattaatatatttatatattatattaacggttttatatattattttagctgtgttgtttatatattatattaactgtgttctattaaccactaattccaggacacttctatcacctaaaaaaccctttacctgtcagcagttactccatcccttggctgctaatctacttcccttctctatggctttccctatcctggacatttcatatgaatggaattatataatatgtagccttttgtgtctgaacaatttcacttagcatgttttcgaggttcatccatgttgtagcatataatagtactgtattcctttttgtggctgagtattccattgtgtgtatatattccattttatttattggtaaattggtggacatttgggttgtttccattttttgactgctgtgaacattcatgtacaagcttttgtgtggacatatgctttaggttctcttgggaatatacttagtgaaattgctgggtcatatagtattccatgtttaacttttttttttttttttttttgagacggcatcttgctctgttgcccaggctggagtgcagtggcacgatcttggctcactgcaacctgaacctccctggttcaagcaatttccctgcctcagccacctgagtagctgggattacaggtgcatgccaccacgcctggctaattttttttttgtatttttagtagagacgaggtttcaccgtgttggccagactggtctcaaactcctgacctcaggcaatctccccgccttggcctcccaagtgttactctttgttttttgtttgtttttttttttgagacggggtctcactctgtctggagtgcagtggcgcgatttcgcctcactgcaacctccacctcctgggttcaagtgattcttctgcctcagcctcccgagtagctgggactacaggcgcatgccaccatgcccagctaattttttgtatttttagtagagacggggtttcactgtgttagccaggatggtctcgatctcctgaccttgtgatccacccgcctcggcctcccaaagtggtgggattacaggcgtgagccaccgcgcccggccccaagtgttactcgttaggcagatacctgatacctgtctgctatactcactggtctgcaccttgcttcacttattatatcttggccatctttgcataccagacatgtagagcttccttattcttttttttttttttttttttgagatggagtctcgctctgtcacccaggctggagtgcagtggcgcgatctcagctcactgcaagctccacctcctggttcacaccattctcctgcctcagcctcccgagtagctgggaatacaggtgcttgccaccacacccagctaatttttgtgtgtgtgtgtatttttagtagagacagggtttcaccgtgttagccaggaaggtctcgatctcctgacctcatgatccgcccgcctcggcctcccaaagtcctgggattacaggtgtgagccaccacgcccagcccctcattcttttttttttaacagttggctcatccattgtatggatgtgccagtctcttcttttttttttttagacagatttttgctctgtcacccaggctggagtgcagtggcatgatctcggcttactgcaacctctgcctcctgggtcaagcgattctcccgcctcagcctcctgagtagctgggattacaggcatgtgccatcatgcccagctgatttttgtatttttagtagagacagggtttcactttgttggccaggctggtcctgaactcctgatctcaaatgatttgctcatctcggcctcccaaagtgctaggattacaggcgtgagtcaccatgcacggcctggatgtgccattctcttattcattgatgaatgtgcaggtgacttctagtcttttttggcaatgaataaccttgtcattttacacacagataaacagattgacaatgcttctgtgtgataggtgcagtaatggagatagacactggggaactagggaaggcttccagaggatagttaagaaaggctcagggtgagtgagcgctggtatctgagtgggccttgcaggcctggcagaatttcagcaggctgagatgttgtaggaagggcaaatatgactgaagaaaagaacaacagctcaggtgtgacaggggaaatgaagagtattagttatctattcctgcataacaaattaccccaaaacttagtagcttaaaacactatctcgcagtttctatgggttaggagagatttacacaaatatgtgaataccagaaggtgaggattgttgccagccattttagaaggctgactctaatagcaagttgcagtaaggataggattggccaaggcaacagatggagccatgattgtggacaatcttacatacttagctgagaggttgtcagagattgatctgagaacagtgtgagccatggaaggtctttgagcaggagaataatgtgatagttgctatacaggacaattaatctgatagcatttatgctagaggggtcaaaatggagagagatacacaggcagaggcctagattaggagatggctatagtagtacaggtgagaaattcctggcctgtagtactaaatacttttttttttttttaagacaatctcactctgtcacccaggctggagtgcagtggcatgatctcggctcactgcaacctctgcctcccgggttcaagcaattctagtgcctcagcctccttagtggctgtgactacaggcgtgtaccaccatgcctggctaatttttctatttttagtagaaatggggtttcacggtgttggccaggctggtcttgaactcctggcctcaagtaatccacccactttggcctcccaaagtgctgggattatgggcgtgagccgctgcatccggcctctgtattaaatactttagctgcatattctttcttcgaaatgaccacaaaaagaaggtattactgattaatatgcatatggtcttgcgtatggccagacttatgacttgcgtatggtcataaaggtagtaagttgcagagcagcactcagacctgcctggctttgatgaccgtgccttgatggcactggaagtggaaaggtgggggtgactggggaggtgaggttttgtccgttccctggatgctaaaaggaaatggaggagtgtaagaggttgattctttgaacctggatggctggggcaaagataacactgtaacaggaagaagagaggccggagggaacactgatgtgatgggagaaggtgagtgatttgggaacatggggcatttgttggcagggtccttcccaattatagggcgagtataaatagttcctgtgctttgtgtatgaagaggtacccttggcccaaaaagactctaaatgtggaaaaaggatatggtggtgtggtggtggtttgaacattgggtttgcgcagatagtgatggtaactggcactggcctgcgcttcagactttcacagcccgttcacttctgttgaaactcacacaaccctattcaggttatcatcattccctatctgattgatgaggaaactaaggctcagaaaaatccatttgctcaaggagaaacagtgtttcagttacctactgctgtgtaacaaatcacctgtgaaactcagtagtttaaaacaaccaccatttatcctttctcttgattgtgtgaattgggtccagatgcttggttctgccccacatgatgtcggccaagcttgcccatttgtctgtgtttagctgcactgtaatgtccaaggcagcttctctttgcatggcctctaatccttcaagagtctatcctgaacttcttgcagcatggcatctgggggccaagacagtggaagccagtcgtgttgaggcctgggctcacgtcccagaacatcacctcaatcatgttctattggtcagagctgtcactgggccagcccagattccaggttgggaactagacgccacctcttgatggaaagagtggcaaaaggtttgtagccatatttaatccacagacagccggtagtggatacctggatttgaacccagatctgtgtgactcagactcacagtctgtcatgccatactgcatccctttctgcttctggttccttgggagttgcaaagcttgctggctcttttgtgtggttggagagggctgatttttcttgtggtctcccacagtggaagttgtactagtcatcccccttttcacagatgagcatccaagatcactgtgtcttagggaaccttccaaaataggtttgctctagggatttgctagcttcccccaagcttcagcagtgatagccagacatgcatggaatttccctgtggagtttccctttctgcgcttagtggccttttgatgcacagtgctcactgggtgggattcctgctgcattgtagccagatgtggaggctagccctattttgagttatcccagatggtatccagcccagtgagtcccatacttgactcaactggcatattcaccagggagttttggggaaaatgtagattcctgggccttcctcatgcctattgaattagaattcccagggatggcgtccaggaacctgcctttaaagctccccattgatttgggagtacagcctggttgggaaaccaatgacttccagaggctggcaccctccctcagcccagtcatttcagaaagatgcctttgaagtcactgatcagaggaggccacatgggagagaatgatttgtccagagggcctcacacttcacaaccaggaagtgactcctgaaagtgtccaggaagtttctatttgaatctgctcaaatctttgatgttgttttgcatgctttgatagtatctgagctttatggtggcctctgggtgtttttctttgaaagtgtttgcagagagtagcaagctcttccagcagtcagcagacactccctaaccaggagctacttggtctgatttatttgaaatatgaaattcctttgcttggctgtctggttggtatctttggtgtgaagaatatgacaaccctagagatacctaggttagcacagcagttggacctttctagtcttgtgccttggacatacttaaggtacacttggaaaagtagattttaaaaccctggataatttggtttgccagttaaataaacttctatattttagaatatttggaaaataaagataaatataaggaagaccataaaattacctagaactttcctctcagagaatttccacggttaatgttttgaatggctattcatccttcccctcatgacccttcacaccccctctttttgaaaaccatattgaagtcatattgaatgttactttttagcagttttgttgagatgtaagtcataaagtccacctgttgacagtgtgcaatttgatggtttttagtatttacagagttgtacaaccatcaccacaatctagttttagaacattttcttagtcccaaaaagacatcttataatccattagcgtgcattcccgcctcgatgccccatcccgcccttactccagcccaagactaccactcatctgctttctctacgtacagatttacctgttctggacatttcatataaatgggatcatacaatatgtgatcttttgtgattggcttctgtcactggacataatcatggtactgttttgaaacctgctttaaacatttatatcctagcaatttgaatatagttttcaagaatgcacttttaatagcagagcggtattcattcttatgagaatatctaatcttatttaatcagtcctgccaacagacgtttaggttatttctcatcttttgctcttatagccagtgctctctgcactcagaaattattttgttgatttattggttaattgtccgaatctgtgactagaacaaaagctctttgagaacagtcaccttctctgtctcccctactacttggcatagttcctggcacttggtaggtattcagtttttaaaggatgtgtatgtgtgtatatgtgcaaattttgaatgaatcaaaatgtaaggatattaataaatgttgccatattgccaaattctagaaagttgtactaatttaccctctcactgcagtataagggtacctgactccctgttcctttgaatctgggttaatttgtacaggaagtcctgtgatcttttgaatgatgatattctctgacctgtcaaccagttagtttgggaattgatgctgtctgtgtcctgaccctgtctgtgggccaggaagggtctggctgttgggaaagatggtggtgtgtgggagctctagctgcccgggtcctcattgtggctccgtggtattgtatcgtttcctgttgcccttagaaaggctgcatcgtgttgtctggccacttcctctattgtgtgcaggcatgttggggagtgagtagagttgggtggataaagtatgtgtaagaagatactggttatggctgctgattggagtgccttttgaagtcgtcaggagagatgtcactctggaagttcagtgtcttcaaaaatagaaatgaagaaatgcttccaggaagtctgatgcaactggcccagtctgcccccatctgagggtggtgggcacccacatggctggtaaacgcttcatgagtcacccactggccacagtccctgctcctctccacacacttcctgtctggaaaagcctgctacccgcccatggtgaagagtcaccccagagaacttgccagggatgcagggcaggtcttcccaggtcacagcagcagcctctcgctcatgggtttcacagcagttcttctccccaagatgagttgtggtaactgctttttagataaatatgtggaatggatggttgggattggaaaaaaaaagagcggctagatggcaaggcagctcttgtgtgtagcagggagctcacacgagccccatggtggggcagttaaggccccagaattcaccttctccagcagctggctgctcattcttttcttcttctcgtggttttcccatcacatttcccttggggtttcttccaggccttcccctactcaccccacaccctctcagaagatgctgcctcatgtaacttggccaagctctcaagcattacagatgcctttaccttcttttctttgcatcttagaaatcactcacatgttggtctctctcacataattgctttttattattacttcagcggttgccaagtgcctactctatgcctagtaccttgttagactcgggaatgatgcagaagaaagagactggaccctgccccctaggagggtaaatgtctgttctcccatggcctctgtttcccttcctctctgactgcgcctttgctgccctggttcctcttcctctttccgctgcctgagtgtcaacattcttcaggcttctgccctctctcctctccctccacgcgcttgtcccttcctgtggctgtgaccatctgctcttatagctaccaaatactaaagttcttttctcctgaaaaccaggtccctgtgtccacctgcctgctggagtgtgcagccttaaaagcagagtccatctttgtctctgctctttgcatatcccctttctgttaataatccgtcattctctcagtttcccggagccttactgacagctttaaacctcattcctctgccatgcacaggtcgttcctcccgttcttttgagtgtttctccccactgattttcctgcctgtagtgagttggatggttgcccctccaaaagatatgtccaagtcctaacccctagaacctgtgaacatgaccaccttgtttggaaaaaaactcattgcagagattctttcctatgctgcagacgtacatgaacctgtgctcattgacctcctctctgggcctggccttgttggtctctggcttgaaatagtgactgtacttctagtccacacagtgattacatatttattactctgtttgagctcccctagtccaaaggcaaagttcactgcctgccctttccactaactcctaggtcagacttgctaggttgtgtgcacagcagctacaagtgtggtttctaaggtgggtctgggtttgaatcctggttctgtcatttattagccaagggcctttgacagattgtaacctttctgggcttcagtttcctcttctggaaaatggagctaatggattgttgtgagaattagattgcatagtgtctagcactgtgcctgacactctgagctttatttttatttatttttattttttgagacggagtctcgctctgttgcctaggctggagtggagtggcatgatctcggttcactgcaacctccacctcccaggttcaagccattctcctgcttcagcctcccgagtagctgggtttacaggctcccgccaccatgcccggcaagtttttgtattttttagtagagacggggtttcaccatgttggccaggttagtcttgaactcctgacctcaggtgatctgcccaccttggcttcccaaagtgctgggattacaggtgtgagccaccacgtccagcccactctgagctttataaccagagagatgctgtggctagccaaatcgctcaacctatacttggaggatcccaagcttggatgagtgtaagagctgtgacttaaatccagcctacttgtatgtcattctgccacagttgtctttgtctctccacagtttgtcctggagctgggcatggtgagggctaagacaatggattacagagctacaggtctaggagggcatgtggaattatgcctatatgagatagatgacaaagtgggtaagagcatgtgctctggagttagacctgggttcagattcaggctctatgaccctatctcagtgaccttgggaaacttttctttgcatctctgggtctcagttttctcatctgtaaattgggaataacaatggttcatacctgtcttagtctgtgctgctataacaaaattcctgagatgggtaatttataaacaaaagaaactgatttctcacagttctggaggctgggaagttcaagatcaaggcattggcagacttgatgtctggtgaaggctgctgtccacttccaagatggcaccttgttgctgtgtcctccagaggggatgaatgctgtgtccttacatggcagaagggtgaaagtggcccagctagttccctggagcccttttataagagcactaatccgttcctgagggcagagccttcatgacctaaacacctccaaaggccacacctcttaataccgttgtattggggattaagtttcaacatgaattttggagggttcacaacattcaaaccatagcaatgtcttatagagtaatcgggatgattaaatgaaagaatgcccataaaacattgaacacatgcctgactctttgtaaacaataattattaggtatcgctattatagagaccagcttctgctgtggagagtgttaagtgccttgatgccacaagccactggacacgcagctgcatggatcaatgtacccctgtaattatgtaacaaggggacatggagaaaaaaacatttccaatgttgcctcctctgtaacatgattgtacccctaaactgcacagaggagctttctgttctttgaactccatagctgttggtacgtctcttgtggggtttgccatagtctgtcttatactatgactgttcttcactctacggtacatttctttctttctttgtttctttctttcttttttttttttgagacaaagtctccttgtgtcatccaggctggagtgcagtggtgcaatctcagctcacagcagccctgacctccccaactcaagcaatcctcacacctcagcttcccaagatgctgggactgctggcatgtgccaccacacctggctaattttttttgtattttttgtagaaatgggatttcaccatgttgctcaggctggtcttgaacttctgggctcaagcagtccacccatctcagcctaccaaagtactgggattgcagtgtgagccaccacgcctggcctactgtatgtttcttgaggtcaagattgggcactgggtaactgattacttgaattgaaccttgggattcagccagtgaaagtggtccacctggcagtagtgaacctctggctcctgacctctgctgctggtgaatctgtttctcctatggctgcacagacacagggtttcctgcctccaaagagcttttccactctgtacatgggacctgaaccggctccagaaaccttggagcctggcaccacttttcacatcacccagcaggagcagaacttagatggaccaggcatagatgggaaacatgggtttattgctaaggtcatggttagttctcggcggtggggcgggggggtttagtgggcaattgctttttggatttttgttttgttttagaagtaaaaaatatgggccaggcgcggtggctcatgcctgtaatcccagcactttgggaggccgaggcgggcggatcacaaggtcaggagattgagaccatcctggctaacacggtgaaaccccatctctactaaaaaatataaaaaattagccgggcatggtggcaggcacctgtagtcccagctactcgggaggctgaggcaggagaatggcgtgaacccgggacacagagcttgcagtgagctgagatcgcgcccctgcactccagcctgggcgacagagcgagactctgtctcaaaaaaaaaaaaaaagaaaaggaaaaatatgtacatttttaatagtggtagtaagaattttctgtaactacttacgggacatcttcactgaggggtctccagagctcctaaaactcagcactcccccagtgattcttacattttcctgccagacttgctcttcttcccacaatccccaccttaatggaatcatccacatccccctggtcacctgacagttgccctctatttctttattctcctcagcctcttttaatcagccaccaagtcttgtttgtccttcctccctaatgtcactcctgttttttgccgtgaggtctgatggcactagtgctgcctggggttgctactgcctcatctcttcaacctttttgtgtcacgatgtttaggagtttctttcataaacagaatgtggctggatttaaatcaaatctgacaatctgtcttaagtaatttatgtacatttttgggatttaacttaacgtattactgtattatattttttagtactttccatgtatttccatttttgcctatttttctccttccgagtttttttttttttttttttttttttggagatggagtcttgctctgtcacccaggctggagtgcagtggtgtaatctcagctcagcgcaacctctgcctcccaggttcaagtgattctcctgcctcagcctcccaagtagctgggactacaggcacgtgccaccacacgcggctaatttgtatttttagtagagacagggtttcgccatgttggccaggctggtcttgaactcctgacctcaggtgatccacccacctcggcctcccaaagtgctgggattacaggcatgagccactgctcccggcccggaattttctttatttctatacattttacttccgttgtttttttcttttttgagacagggtctagctcttttgcctaggctgaagtgcagtggtgtgatcacagctcactgtagctttgacctcctgggctcaagcaatcctcccacctcagcctcctaagtagctgagattataggtgcacaccaccatgctcagataatttaaaaaaaaatgttttctagagatgggatgttactgtgttgcccaggctcgtcttgaactcctcactcaagccctcctcccaccttggcctccaaaagtgctgggattacaggtgtgagccaccttacctggcctttatttctgttcttactccaacattttctcatcttttctcccatccttttacttagaaaaatgttaaaattagaggaaatagtacaatgaacatgagtattctctttaatcttattcaattaatatatttctctgtatatgtatatatgcttttgtttggaatcatttgaaattaagtgtggatttgttctccatcttcttgctcaggatttggtgtgctgcttttatctgaggactcatttataaaagaaaaaacaaagaaaaagcctttttactttaaaatgattgtagataaacttagctttacacagagtttctgtattccttcacccagcttcccctaatgttaatctcttacatttaattctttcttaagttctggaaaatttcagccattgcctctttggctttctcgttttctctacagtggcctctggaatgcctcttagacatattgttgagcattttaccaccaaagtctctatatttgttctttctgtgttcctttatctgtttaatcatccaagttttcttgtgtagtttctttgagactgtcttatttctgattcttgggatgctacttctctttttgtgtctgaggcttgcccctcttggtggtttatttccttgtgtggtttgtaactttgggtgtgagttcatctccaggagggattctcttttctggctgagacttgggtcctgaattatgaaagtatacctcagagcagcttgtttgcctctggcggggccatgagtgtttcagtggtcctggctcagtttttgttcactgcttagtgcggcacccctttactaccctagtagtgtaagttcagttttatatccatgggcaggactagcttggtggcttaagaaagggtgacctcccgccgggcatggtggctcacacctgtaatcccagcactttgggaggccgaggcagggggatcatgaggtcaggagattgagaccatcctggctaacgcggtgaaaccccgtctctactaaaaatacaaaaaattagccgggtgaggtggtgggtgcctgtagtcccagctgctgggaaggctgaggcaggagaatggcatgaacccgggaggcagagcttgcagtgagctgagatcacgccactgcactgcagcccgggcgacagagtgagactctgtctcaaaaaaaaaaaaagaaagggtgacctcccacccatacctgacccacagagccttggagaagtgttcagcttcttgttgctttcctttactgggcagccctttgaggctctcttcttgatactggggctcaaagccacaggcaggctttaaaccgcttcatttgtgggtgcgaaagtccacaggccattgtggtgtcagttccactcactgtttatgtttcaattcttctcgcacataggcatttctctttccaatttggctgcatgtctacggacgtcatttgttttattttatctggtatttttctgtgatagtggtggaaaggggaagctctttcacgttaatttagtcccgtatcctactgaaagtttgttcaaatgcttagcgtgtcatatgaagcttttcatgatgcagcccattctacctctcctgcataaacttagctcttaaattttacacttcagcaaattgaactatttgcataccatgtactgtaatgtttaaaagcacaggttttagggtccagctgtttggcttggaacctgtcttttcataaggtatgattttggacaagttacttatcccttccataactcagctttctcatctgtaaaatggcagcgtccggcatgcagtaaccctgatccctgttggctgcctctgtggttgctgcccccagcagttgaggctgccaggcctctgcgcaattgcactgtttattcctttgctggaattgcctgtctcccctcctctccttgatccctcccaggagagcagcctttactccttcagagcttggggtctctgtctgtagtaactatcactctgtgggtcgctgcttgtttacgtatctttttttttttgagacagagtgttgctctgtcgccaggctggagtgcagtggtgcgatcttggctcacggcaacctctgccttctgggttcaggccattctcttgcctcagcctcccacgtagctgggactacaggcgtgcaccaccatgcccagctaatttttgtatttttagtagagacggggtttcaccctgttggccaggatggtctccatctcttgactttgtgatccgcccgcctcggcctcccaaagtgctgggattacaggcatgagctactgcgcctggccacgtatctccttttttcagccgactctgacccccttgagagcagggtcttgtttttcttggtacttgaaactccttacattctacctgtcatttggtgggcattcagtgttggtagtttaattgcattgaatttctctggctgagtagaggcaagtgctgggagtggtatgggacgcagaggcagggaatgacagcaggaaagcttgttttttggcacattttgtgccaagttgatggaaatgtgaatcagtatggctgggacacaaggtaacaattcttagtctagctgaggatgccagagacttaaaacaagccagtggccagaaaaagccactaaatcttgcaaattaaagtggtttccagacttaagaatgcatgccccacattcccttcccaaactcagcgtctctgagtgccaggtggaggaatacaaactaattataatcctagtgggccctgagaatctttaattttagaataaggctgcacttctgaaaggcgcagttgctttaggagtaggtgactctgtatgcccggggcctccgaggagaccaggatgtgaaaactcagtacctggcatttagagctgtgtcacccatcacttctgacctcgttaagatttctaccctactgcgacttaacaactaaaaagggcagatgagataggtccggggcagagcttaatggcctgtgtcattctcctcagctttgcctgaattctctggactcttgagactctatcataggaatattctcagaagagaaggcaatcgaacctttaaagatccccagattatccatcagataacagtctcatgagagtgatgaacaatgacagcaccaactctcaattcccttggctggaatttcaggaatcagcttgaactcagaggtgggcacagggttagggcttggagtaggcgtcttttctttctttttttttttttttttcttttttgagatagcgtctcactcttgttgcccaggctggagtgcaatggctcaatctctgctcactgcaacctacgcctcctggtttcaagcgattctcctgcctcagcctcccgagtagctggggttacaggcatccgccaccacgctcggctaatttttgtatttttagtagagatggggttttaccatgttgcccaggctagtctcgaactcctgaccttgtggtctgcccaccttagcctcccaaagtgctggtattacaggcatgagccaccgcgcctggcttgcagtaggcatctttgcccaacccacgtgaatcccattagttctttcttgacagctctcagtctgtggtcatatattaagcaactatgtgttcagtactgtgctgggtgctattgctgaagatacggaaatagtaatgccacaagtccctcttcttagagaggagagcttgcactctagttggagagaattcctagcacacagaaagctgcaaccagtggtgcccaacagtaatgctgtctgatgccactgcatgcaagtgtgtccctttgacaacttggtgcttttgcccaaaaggagctgttctctttctgaggcttggactattcgtttgttttttctcagatgacttgctggcactgttacagactggtctgaattaactaggactaccttttatctgtttctgaggaatagccccaaatgtgctctctcttggtctttatgaacttttcctttcttccatttctccaaattatgatagattaactttgcagtgtcatctgctaatctccaaggtcttctaggggcacgtcatcagcagttgctgcttttgaggtatcaaggtttgtcctgtggagtctcagatagtttctttacctgttcaatgaatctgattttccatttttctaggagagtgtatctcaaagtgattgctgaatcagaatgtctgggagtgtgacttggaatctattactgaagattagaggaaaatgtagcaaattgtgatctgaagcatttatggatggattgatggattgatggatagggattctgactgagttaggtagtctatagtctcagacagttgtggaagctccattaggtcatgagcaacccagactccttccaattctgtgccctgccattcttagggtgtggctgctgtcctcatggtccaaaatggttgccgtggttccacatctcacagtgagatagaagaagacagaagaatgatgtctcacctcccttctaaggagacttcagcaaagcctgcctctaccactttctgtgactgagggaaagttaattcatactcagagccaattaacctcgtgttttttttttttgtttgttttttttttttttttttttttttttttttgagacaaggtcttactttgtcgcccaggctgtagtgcagtagcacaatctcggctcactgcagcctcgacctttcgggctcaagcagggctcctccctgctcagcctcccgagtagctggaactacaggcacatgcaccacacccggctaatttttaaattttttcgtagagattgggggtcttgttatgttgcccaggttggtctggaactcctgggctcaagtgatcctcctgccctggcctcccaaagtgctgggattacaggagtgagccactgcacccaaccagttacctcatttgtaaaacaggcatggtaacacttagtgcaggagcaagaggatcagggagcacacatacatacaaagtgcttggtgctgatgcccagcctgcagcacctgttctctaaatcatagcagcaattgctgctgcagcacacttctctttctcctctctccaccgctccatctctccagggtctctaccttgcctgtcaggctccactttcctttgctcctgccttttgcatctgttcctctctgcattctcccctcatctcctctcttccgtgcacctcattttcctgctcccctcctgcctctgtccctcatcttcttttcagagacttaaaaccagccagtggccactggcttttcagtgtctcctcctcctccttgaactacctcttccttctagtgcttctgtccttccctcctcctgacctccagtgaacaataattatttgtaacgtaatgacaaattatcgttacgttacaaagaccagaggttagaggtggtgattggccttgtaaactgtaggtcagcgatgagtaatttaagaaaactaaatttaattggtttactcatgagtcagttaggaattctatttggcagctagaacagaaatagcagtggcttaaaccagtagaaattttttctattgtgaaaagaaatctagggggacagtctagggcttgtctctccgctctgccatccttagtgcagggcgtccaaccccaaggttgtatcatggtctaagatggctgcgggagccccaaccatcatgtcaggttctaggaagaaagcaggaagaagagaggaaaggcaaaaagaacacatgctccatcttaaggagctttcctgcaagtcccaccaaatagcttcagcttctcctccttgcctccattagttgcaagggaggctgagacatcatttagctgagcacattgctacctgaggtagaattgggattctgtcaccaagaaagaaggggagaatggatattgtgtaaacaattagcaaggtctgccgccattcattcaacattaatttagcacctacaatctactagttatgaagaacagtcaaggtgccccattccagagggaagacatagataagtaaacaagtacagtacacaggatgggtgaggaagagggggagagtggagaaaggcatgaagtgggtatcttacataccctccaagggcgcattctagagttcgtcatgcagacattcttgcctgtggtttgtttcctcttctgctctctcctttttgtcattgtcgccattgttgttgttggggtttgtttttgcccctccattctgacgtcagcagtagcccctagaaccttaggaaacagaaacagttggcctagtgggaagctctgggatgggagccatgtgtttgaagagccaagtcccagggccattaggcaattagaggcctgtggcaggagagcattcgttcctggacatgccgtggcactgccaggagactttactccaggaatggggtcgttgtcaggaggcatgttctaaccaggcacctggcatcacctatactgtgcttgccataaaatgaaattttggagcagtaaaattctccaggtcccgtgaaatgggtataattgtttcacccacattaatttaaccagaggtcttggtatgctatagtgttaattatgtgtaaaaatacttctacttactataaaatgtattgacagttagacattgatattccttcttagaactcaaaaattctaggaataacttgggagacccacattatctttcattttgatcccaagaacatctattgctgtttcctttgggaagttagagaggcaatgggaagcctgctgcagagattttctaaacaggcatatcccagcccctaaggagtttgaaagtgtcagagaaggctaaaggattaaaagatcgtttgttctggcacagtgcaatccttatgaggttgtactgtgaccctgggcaagttaccatcctatcctcagtttcttcatctgtcaaattttgatcctgtggaccctccccaacagggctgtgatggaaatgaagagacacatgggaagcattcagtatgtgttgttgttattatcatcattattgttatttttattattattagtgctactggtagtgctagcccactagcccactgggcagcgactgcacccgtatcagagtgtggaaagccttggatgccacattaaggagttggattttgtgggcaagggtgtgacaggtcatggctgggcttagaaatgtcactgacaggagtggagaggcagatctaggtgaggagtgggcagggcttgaacctggccagtcaaggaaaggggagaatggatacctgagtggtgagggaggacccactggtgctggagttcagcctgtgtgcccaagggatggtgtcccattgacttgggtgggaagcactagaggtggagcagttggggtggcaggaggggaaagaagcatatggtgatcagctcagcaaacaaatgggtaacttgcgcactcagtgctcggtggtgcccaggctggagtgcagtggcgtggtcccggctcgctacaacctccacctcccagccgcctgccttggcctcccaaagtgctgagattgcagcctctgcccggccgccaccccgtctgggaagtgaggagcgtctctgcttggccacccatcgtctgggatgtggggagcccctctgcctggctgcccagtctgggaggtgaggagcgtctccgaccggccgccatcccatctaggaggtgaggagcgcctctttccggccgccatcacatctaggaaggaggagcgtctctgcccggccgcccatcgtctgagatgtggggagcgcctctgccccgccgccccgtctgggatgtgaggagcacctctgcccggccacgaccccgtctgggaggtgaggagcatctctgccccgccgccccgtctgagaagtgaggagaccctctgcccggcaaccaccccgtctgagaagtgaggagaccctccacccggcagctgccccgtctgagaaatgaggagcctctccgcccggcagccaccccgtctgggaagtgaggagcgtctccgcccggcagccaccccgtccgggagggaggtggggggggtcagcccccccgccaggccagcagccccatccgggagggaggtgggggggtcagccccacgccccgccagccgccccgtcagggagggaggtgggggggtcagccccccgccaggccagccgccccgtccgggagggaggtcggggcgtcagcctcccgcccggccagccgccccgtccgggaggtgaggggcgcctctgcctggccacccctactgggaagtgaggagcccctctgcccggccagcggccccgtccgggagggaggtgggggggtcagccccccgcccggccagccgccccgtcagggagggaggtaggttcagccccccgccaggccagccgccccgtccgggagggaggtcggggcgtcagcctcccgcccggccagccgccccgtctgggaggtgaggggcgcctctgcctggctgcccctactgggaagtgaggagcccctctgccaggccagccgccccgtccgggagggaggtggcggggtcagccccccgcccggccagccgccccgtccgggagggaggtgggggggtcagccccccgcccggccagccgccccgtccgggaggtgaggggcgcctctgcccggccgcccctactgggaagtgaggagcccctctgcccggccagccgccccatccgggagggaggtgggggggtcaggccccgcccggccagccgccccgtccgggagggaggtgggggggtcagccccccgcctggccagccgccccgtctgggaggtgaggggcgcctctgcccggccgcccctactgggaagtgaggagcccctctgcccggccagccgccccatccgggagggaggtgggggggtcaggccccgcccggccagccgccccgtccgggagggaggtgggggggtcagccccccgcctggccagccgccccgtctgggaggtgaggggcgcctctgcctggccgcccctactgggaagtgaggagcccctctgccaggccagccgccccatccgggagggaggtgggggggtcagccccccgccgggccagccgccccgtccgggagggaggtgggaggggtcagccccccacccggccagccgccccgtccgggaggtgacgggcgcctctgcccggccgcccctactgggaagtgaggagcccctctgcccggccaccaccccgtctgggaggtgtgcccaacagctcattgagaacgggccaggatgacaatggcggctttgtggaatagaaaggcgggaaaggtggggaaaagattgagaaatcggatggttgccgtgtctgtgtagaaagaagtagacatgggagacttttcattttgttctgtactaagaaaacttctgccttgggatcctgttgatctgtgaccttacccccaaccctgtgctctctgaaacatgtgctgtgtccactcagggttaaacggattaagggcggtgcaagatgtgctttgttaaacagatgcttgaaggcagcatgctcgttaagagtcatcaccactccctaatctcaagtacccagggacacaaacactgcggaaggccgcagggtcctctgcctaggaaaaccagagacctttgttcacttgtttatctgctgaccttccctccactattgtcctatgaccctgccaaatccccctctgtgagaaacacccaagaattatcaataaaaaataaataaatttaaaaaaaaaaaaaaaaaaaaacaaatgggtaacttgctgcctgccagggactcctgtggcctggcatgaagataattgactgtgttttgaacgcattataaggcccctgcgaggcctccgtgtggtatttagacagtcagcaggagagaggccccggacagtggtgtgggatgcagtcccggtgtgtgaaattgccagtggttggattgtgcagcggatggattgagcagggaagccagccaagaacagaatggggtggggagggcgttgggggtaggaaaggaggatcatcatttcaagggcgggtgagggaagaacaagcagcagagtgcaaagcccccagagggaagggcgatccttatgaggttggactgtgaccctgggcaagttaccctcctgtcctcgggaggaagtggttgacagaatcattgcagcagtgagatggaagcaggaccagggcagcagccaagggcctcttagatggcggggcgagaggaggtcatccaggacctccaagagaactgtttcaaaatgggaggagaaagcagtgttcctctggtggtggttctaatgctttgtatttgtagttcttagtcgttttcaaggccctttgcattctttgcatcgtgctctcttaccacgatgcatagtgagaccccacctctacaatttttttttttttttttttttttcagtgagccaggtgtggcagtacacacctgtagtcccagctacttgggaggctgaggtggaaggattgcttgagcccaggaggttgaggctgcagtgagctgtggtcatgccactgcattccaacctgggtgacagagcgagaccccatcttaaaaacaaacaaacaaacaaatacttggttcatttggtacttggctttttggatcttggggaatattggagatgacggaataacttcaaggagactaacttcaaggtcaagactcctgccaagactccaccagacataaaataggaaaatgatgatagaatctacctcactgttggcctggcagtgggagtttgttgataaccctgaagatgaactcctcaaggtgaagagcaaggcttcagaatgggctgctctatagatgtgagagacagagacagacctagccttgcaaaaaggttgctgtagtctttctcctaccatttccagcacaggatggtttctggtcccaggaggccctgtcttgtgctgtgtgggacccttagtgctgtgaagactagcagcaccctggaggtctttgttccttctgccctttcccttagattgcatctcctaaccttggtttatatatttgtcaggaggtgggggaaacctgctttcccccacctcctgacaaatatataaactggaaattgatccagtcctggatcagtttgggtcacacaacagggtcggcagtgttggcccacagagggccctgggccccttatttcccctttggccctaggctctgagctctcaggttttggctaccaagcaaaaggtggagttgcatcagttgttgctctttaccaggcccccaggggttgctgtcggtgagctcacaggatgttttcttctctctgctttgacttgtgctgaatttctgactgaccccatgcagcatctgcgtggcttctggggcccgagcccaggtttcagcaagctgcccatggtttaccctcaggatgaactctaggaagctggggagcactgtggtggtggtataagttcagcccctcattttagtttatttttatgttaaaatgtttattaatacaaaataacacatagatcagaatgttgtatgacagaaagggactgactggactcaggatctcccaccccagccccaggggtgaaggtgaaggtgattggtttcctgggtatcgttccttccacggtttttccatgcacgctctcatgtgcgtgtgtttttatcctcatcctgctcttcaccgtggcagtggggagcacactaaattgctctgacacctagttagttttttttttgattgagtgtatcttgggaatctttccatatcagcatatacagatacactgcattctttttttttttttttttttttttgagatggagtcttgtgctgtctcccaggctagagtggaatggcacgatctctgctcactgcaacctccacctctcaggctcaagcgattctcctgcctcagcctcccaagtagctgggattacaggcacccaccaccacgcctggctcatttttgtattttgggtagagatggggtttcaccatgttggccaggctggtttcaaactcctgacctcaaatgatctgcccacctcggcctcccaaagtgctgagattacaggtgcgagccaccacacctggccattcttttttttttttttttaaagcttttttgttgtacatatgatgtatgttaggtggactgtggcttataaaacctcttcatagctgttttccagtgcgatccttctagccctgtgaggaagacagaccagaagaaattttttgcagcttaggatactctgcaaacaaggaggaagtgagaggagttggggctcatttaatgcagactaaaacaggatctttcctttgagagactgagacaggatgaggagcaggctgtagatgtgcacacatatccactcagagagaacatgagaggcagcatctgcagaggagcctggtgggcagcacgtgccgcgggggcaggaaggggagagcttccgggaaggggatggaacttgagccaaacctttttctcaaaaagaggggaggccgggtgtagtggctcacacctgtacccagcactttgggaggctgaggtgtgcagatcacttgaggtcaggagtttgagaccagcctgggcaacatagcaaaaccccatgtctattaaaattacaaaaagtagccgggcgtggtggcgcacacgtgtaatcccaactactcaggaggctgaggtgggacgatcacttgaacctgggatgcggaggttgcagtgagccgagatcgcgccactgcactccagcctgggtgacagagtgagactctgtctcaaacaaaagaggggaaggtaggaatgagacaaaggaaaaggggaggcgggcatttcaggcaggagagcagcataggcagaaggtgcaaacatgtggcagagggtcggtgtccatggacacgcttccaccacctggtctaatcattgacttatcagacatctaaatgcctgctgcgtgcccagcactgtagagggccacaaggcagcaggaacctctcagtgcctgccctctgtgggctctgactccaaccaggagaaactggacgcacaacagcaggcaaaactagctgatggtgatagaggtcagaagagtggtttacagccaggcacagtgactcacacctgtaatcccagtactttgggaggctgaggtgggaggatagcttgagcctaggaggctgaggctgcagtgagctgtgatcaggccaccactgcattccagcttggcctggacaacagagcaagaccctgtctcaaaaaaagcggagtagttacttattgtggagattagctgttcaggggcacaaagaaccttgtagggtgctggaaatgtttactgtcttgacctgggtgatgggtttttttggtttgttttttgtttgtttattttgtttttttgagatggagtcttgctcttgtgccccaggctggagtgcaatagcactatctcggctcactgcaacctccacctcctggcttcaggcaattctcctgcctcagcctctcgagtagctgggactacaggcgcctgccaccatgcccggctaatttttgtatttttagtagagacaggggtttcaccatgttggccaggctgatcttgaactcctgaccccaggtgatccgcccgcctcggccttccaaagtgctaggattacaggcgtgagccaccgcgcccagcctgggtgatggttttatggtggtatataaatgtaggaattcatggggcttattatgtttaagattaatgcagattgcatactctaaccatgagtatgttataccccaattataaatcaagcaggcaaataaatagcatattccccaaaataaagaagtaaaatgcaatagcaagaaagtgtgcaaagagctatgcctgggaaaatacaggaactgtatcattttgaaagggtgagagatgagatttcagaccctcaccctctctcactgtgtcatttctgaagggccctggtgactttctttgcccctctccactcttacagtcattggaaccagagggcagaaccccgggcctcaaaattaagtctatacaccttagaaactaggaattcaaggctagccaggtcctggccctttatctgtccttcagagagtggggtgccccagccaaagcggacagctcgccattcccagatgtgccctgtgttctcggctgcgttgcctgactcaccttggccttccctgggagtgccttttctagttttctggcccagctagaagaaagggccattacacctactccagaatcatccctgctgctcccaagttggaatatttcttcctccacagtggccacctcttatgtgccctccatcacacagtttgtatacttacctcttcaagggcaggctgtgttttactccttttgtcatctctccccataggggtctaggtcagtgcttttgtacatggtgcctgaaacagtcccataaatgatattttatttgagtggggctctctggctggagctactaggtggaatgttgccatgtgggagcaggggtcataacgaaggctggccatcaagatgctggtacttccaaattcccaacagttattaactttcaggattgaggaacaagtaatagaaattccctggaatgcccaaaatcataactttttctatatctttcctaacactttatgagtttttaaataaggagtggtcataataataaatggaattattttttctgtgataaaatttcagaggtgtttctgtaaaaaaaaaagaaagaaaagaaaaagagaaaaaaagatgtaacattaaatgcgtggtttggtggtttggttgggcacagtggctcacacctgtaatcccagcactttgagaggccaaggcaggaggatggcttgagctcaggagtttgagaccagcctgttaacagagaaagattttgtctctattaaaaataaaaaaaattagccagcatggtggcatgtgcctgtagtcccagttactcaggaggctgaggcaggaggatcactggagcccaggagtttgtggctgcagtgagctatgatagcaccactccgggtggtgacagtcttggtgacagagtgagaccccatctaaaaaattaaaataataaaaataaaataaatgcatagtttattgttattatggacaaatatattgtgatatatgattgtatatatttcattagcatgtaaaaatgatctctatctgatatagacatctgataatagaaaatgcggaagagagcattaacacaaaatgaataccaaataaaaatcacttaatgatttaagagtaatactacacatatttaatatttaaaagttactcttaaaggttaaaactagagaaaagttaaaagaataaaacaatgaatttctgtatttccttcaccaagattcaccagttgctaacagtttggcgcatttgcttgatgtgtcatagattgtccacattccatatctgttggattgtttccttgtgattagattcgggtttacgttgttggtgggaacccacatagatgaggtgtgcttcctgttgcttacatcaggaggcacagtggtgccagttggccctagtaaaagtgatgctaacttgattcacctagttaagttggcatctgtgaaggctacttttgtattaaggcagtgaacttcgaaaggaacttttccctgactttgggaattgctgacagccatttaggaaaagagacgactgttttctctgtcacgtgtagctgcagttaagaaacatcctagtatagtcagacaagctctggaagccagtatgtcaggacctgggaccaagctctacagccatctctccctgtgaccatagccaagtcatttctgagctatgtgagactgtacgtataaggaaatagacactcagagaagtgaagcagtttgcccaaagctactcagctagtgagtgacagagctaggattcaaacccatttttgtctggggacaaagccctgcccttgtccttatgccaagctgcctcctttgtgaggcagctggttgttatgattgtggcactgaccactcagatgttgtgctcggaaccaagcagaagagcaccaagccttataggccctgacaggtgagagggaagagagaggtgccttccttcatccatctggactgcccttggaattcctgggccaatttggggaaccctggcaccaaccctaacatgggccagtgccagcaccaggtatatgcagcctgtacttcccagtctgggcaggcaaaggctggaaccgcaccagcagctctcctctgtaacgcagcacggaagtatttatttcaagggtggctcagagaagtgaagcagtttgcccaaagcaaactggttcctcccctgcatgtggcaggctgtcctgcaagctgggaggcgggctgttggacgctccccagccacccttgaaataaatgcttccatgctgtgttgcagaggtgagttgctggcaccgttccagcctccgcctgcccagactgggaagtacaggctgcacatacctggcactggcccactttagggttgatgcatgggatccccagattggcccaggaattccaaggccagtccagatggatgaaggaaggtattgcctcagcctgcctgggttcctcgggggagagagggagacaggaagcattaatgggggaaaggtgtgccaagccttgccaagcaggtcattgtgggtggggagacaccgcctacgtgctcgggacgccccaggatttgggtggaggttcttgaggaggcagcgagaaaggagagctgtgacagcgactctggagcactctagaatggctcttagtgaccttctgctctggtgacccaccagcagcccaccaacctgtcatcttccagttagcagccatccccagggccagtagcacctgagcacttggtaagtagaaagacccagtgtctgctcctcatgttaccctggtgtccttccccagagcagttgttttgggaaaaactggctccggctgaagcaggaaatggtgctccttgtcaaggtcatgttgtcctgttgctatagaactgagagaccctgaggatcagccctctgaggttcctgttacctctctttacactattcatcctcataggcctccaggaagggggccaaattcagggccaggaccagggccagtggcttggtgaggcataggctttgctgtatgggccctgtggggagctctggggagttcttattcccctggctcatggccaccatcatggagagacccccagggctctggcagccaagtgggcaggagcggagggagggggcatcttgggagggagagccccgaaaggaaacagggtttatagacagactcccggtcatcactgcttgtaatgcttgctcagtgaacagtggcagtgcttttcctgactctttcaagagagtcccttctctctcctgctaggtgggctgagatccagactggttagaagcctaacatgacctggcgtgtgagaccttgcactctctgaatgtattccccaagtgtcatcaataagtcactccggttctggcatttccctatcttatcctgcatacccctcctcctggctctgagtcctgaggagtgagattgcagtttttgacccatgttcttactgagaagtgggctgtcatgcaggtataatataaaatccagaagctgctgtcagaattatgtgagaattgggaggtgacagcatgggccaattttctgaatctctagggtgctttgatgcttaagaagtctttctgggctccctgagatttgaaacctcttgttttatctgtcctttcactctggttcttcctttcctttcttggggacttcatgcttctcaaatatttgttaagtgggtgcttatatgggaccttagaaagcaaccagctaggcatgcacttggaaagggacaggaggactgagaacaagactaaacatttctgtgagattgagcagcaggagagctttgcttctttactggtgtcagtatgtgcctgcagctcctgggctgcctttactcgagtgagatccatttacaagactcctgactcttctactccactttattacaaaagatgttgatgctcgttttaaaaacaatttaaactacaaacatgaataaaggtatttatctccccaccagtccccctcattctcccttccctcctgttcttagactggtttcccctcccagtagtttaggttgtggggcaagtgtgtgtagctctgcatcagtgtcttaaacaaaatgagtgtgtcgcggatgcgcagctcggccacttcctgttttcttcggctgtatgtcacggccatcctgccatggcaccatgtctgtgccacctgctgctcttgggcatctgcagagaattccatgacatggatcttgaggtagtcttcttcagctttttctacttcatcttattttctacaatcatttatatctgcttgtaaaacctttttttaaaaaacttgcttactagacacagcacatgttcattttagaaaatgtagaaaaatcagataagcagccgggcatgatgactcatgcctgtaatctcagcactttgggaggccaaggcaggcagatcacctgaggtcaggagttcgagaccagcctggccaacatggtgaaaccccatctctactaaaaatacaaaaattatctgggtgtggtggtgcgtacctgtagtctcagttacctgggaggctgaggtgggagaatcacttgaacccaggaggtggaggttccagtgagccgagatcatgccactgtactccaacctacgtgacagagtgagaccctgtctccccgccccccccaccaaaaaaaaaaaaaatcagataagcaataaaaaaagtagaaatgacccctaagaggtaacattttggtgtgtataatacaaatgtcttttacatttgctccctcatctcagcattgccactgccattaaagaaggcacatggtcattagtcccatctcacagatagaaagcctgagccacagagagggtagcaggttgcccagaggtacacagcatagtaaagacagagctgggggtgtacctgtcatataactcagcactaatgctctctccactgtagcccacttgctgtcttcgcaccttgggacagagaggggggtgccaggcattggatttcagatgcattgaactgccttatccgaaggttaatagacagatgactgcttgaggaaagcccctgattgacttaggagaagaggtagaagacacgctcttcaggtttacagacaatatgagacaagggattgtttgcgctttagagaacagaatcgggcttagaaaaccctcaaagagctctaatgacaggtcaggagcaacaggataaactttggaaggggtggatgtaaaggggcccccttctatttccgtaagcacaggaaggcctgacttgatgttcaggcagtgatgactggtctgcctgggagtcatagtggactgtaagcagggggacatgtcatttcaacactttaacttcatcttacttcctgggagtgttaggagccacacatcaagaggacgtgatgaactaaggaagagggtttgggaacctgtcaaatgacaaatgctgcagtgacagaggtttcacctagagaagatgggtttggggaggaaaaggtgcaggccaagacttggtgaccagggccaggcaggacaggaccaggaatggcagttagttgaagggagagtctaattggtcaggatacagaacacctttttagcattagagttcaggaatagtagcgagaggcagtacagtagagtggttaagagctcctgctctgatggcttactggctcccggctcccagagtcttggaagttacctcactcttccatgttccaattttctcatctgtaaatggggataatgggtacctgccttatagtccacttgtaaaacctaagggagttactccatgaaagcagcttagaataatgcctggcacacagaggtgctgtgcactgtttgattcacacggaagctgggtaggctccatggaagaagagttgtagaaggtcttctgcatgcatttggtatgacctgcttacccagccttttccattccctgcctccctgtctccttctttctttctccatcttcctctcctgggtctaggatcctacatttcccctacctaggacaccctacccctcaatctttattttcttctttgaaactcttaagtattttatttcttcttcttcttctttttttttttagacagagtctcgctctgtcgcccaggctggagtgcagtggcacgatcttggcttactgcaagctccacctcccaggttcacgccattctcctgcctcagcctcccgagtagctgggactataggcgcccgccaccacgcctggccaattttttgtatttttagtagagacagggtgtcaccgtgttagccaggatggtctcgatctcctgacctcgtgatccacacacctcggcctcccaaagtgctgggattacaggcgtgagccaccgcgcctagccctatttcttcttctttaaattgtttttattaaaaaaaaaaaaaaaggccaggcgtggtggctcatgcctataatcccagcactttgggaggccgaggcgggcagatcatgaggtcaggagacagagaccatcctggttaacgtggtgaaatcccgtctttactaaaaatacaaaaaattagctgggcgtggtagcatgcgcctgtagtcccagctactcaggagactgaggcaggagaatcgctttaacccaggaggcagaggttgcagtgagccgagattgcaccactgcactccaacctgggcaacagagtgagactctgtctcaataaagaaaaaaatgagacagggtctttctgtgttgcccagggtggtctggaactcctgggctcaagcaatcctcccatctcaacctccctgcccagctgctgtgcccagcagtattttctataattagcatagtgtacttttcagattatcttgaagacccagctctccttgaccttgaaccttccctgaggcctccagaggcaatttcctcctcaggactcagctgcccttcactcttccctcgtgcacagcctgtcctgtgagtaggtgcaggtactgactggtcttatctttcgccctgaaaatataaacgttttaaaggcacctgaggatttgtcagcacctccccacccccaccctgggtctgacctaggactctgagtcagggaggcctccctccactgagtaatagtagccttgggatctgctcagcaagaggattgtatagtttaagggaggaagaagcaccagtgctgcctccccatgggaaaaatgaagccccccctcccgcaaccaccaccaccacagaaccaccaaccccaacgtcacttggcagattagcaaaagaactagccagacgctgctaggcccctcaggcttctagattcgctctccaccacatttctaccaatttatgctcatcttgataagctcctcctttgaagggtctggaatggtctggagtggtctggaaagcagggtcagatacccctggaaaactgaagcccgtggagcagtgatctctacaggactgcttcaaggtgcgtggtgaacagacgtctttttgcaattatgccagttgctcctctgatacttgagggttatgtgaatctaacaacagacaaaaatctctgcctcctggggcttatattctttgggaagagacaagcactaaacaaataaggaaatatatatacactctgccagatagccataagacggatggagaaagttgaagcagggaagggagatggaagtacctgagggtggactacgcatatttgaaatagggaagccagggaagacctcactgagatggccacatttgagaaaggacctgaagaaggtgaggcagtgagctgtggaggtgggtaactggggagggggaagaactttagctagagagaaaagccgctgcaaaggcccactgaaggcaggatatgcctgctgtgtcgagaccagcaggaggccgtgtgcctggtacttaatataccagaaggagtggagcaggcaggggtaccagttccagaaggacttgctggcaggtattaagatgggctttttctctgtgataggaagctccaggaaggatttgatcacaggagggacagaatctgaattgtattttagaaggatcactttgactgctgtacagagagtgggtggtgaggtgggaggcagaagccagaaagccagttaggaggctgttaagtaatccaggcaggagatggtgttggctgggaccagggtcatagcagtagaggtggtgagaagtaattagattccgtatatttattaaaggcaaagccagcaagattccttgactctaacttaaaggttggagttgtcatttactgagatgagagagaccatggggggaaggtaaagggctcggttttggatgtgttaggcttgtgctgccattggacatccgtgtggaggtgtcagagaagctggcctggagaaataaattggggaatcatcagcatactgaaggcattggaaggcacaagctggcataagatcagaaagagatggagcgtagatggagaatgaaagagacctttagagattaggaagaaaattactgactgagaccaacaaagtagattgatacggagcagccagtgatatcagagcaaaacctgggaggaagccaaatgaagagaaggcgtagaggaggagggatcgagcagtcatatcactatcacatgctatcgtgggtcaagtaaaataaagatcataagtgttaccgaaagtttcaaagtacagtgacattggccaggcgcggtggcttatgtctgtaatcccagcactttgggaggccaaggtgggtggatcacttgaggttatgagttcaagatcagcctggcccacatggtgaaaccctgactctaccaaaaaatataaaaattagccgggcgtggtgacgcatgtctgtagtcccagctatgggagtctgaggtgggagaattgcttgaatccaggaggcagaagttgcagtgagctgagatcgagccattgcactccagcctgggcaacagtgagaccctgtcccccaaaaaaaaggccgggcgtagtggctcatgcctgtaatcccagcactttgggaggccgaggtaggcggataacttgaggtgggttcaagactagcctggccaacgtggtgaaactccatctctactaaaaatacaaaaattagctgggtgtggtggcaggtgcctgtaatcccagctactctggaggctgagacaggagaatcacttgaaccggggaggcagagtttgcactgagctgagatcgtgccactatactccagcctggacgacaaagtgagactctgtctcaaaaaaaaaaaaaaaaaaaacaaaggctgggtgcagtggctcatgcctgtaattccaacactttgagatgccaaggcgggaggatcacttgtgatccgggaggagttcagttcaagaccagcctggccaacatggtgaaaacccatctctactaaaaatacaaaaattagttgggtgtggtggcatgaatctgtagtcccagctactctggaggctgaagtaggaggatcacttgagcctaggaggtggttcagtgaactgaggtcacacctgcaccccagcctagtgacagagcaagactctgtctcaaaaaaatcacctaccaccctcttcatacaggggaactttcttctattctttttctagtcattttcatgagaatcatgatctttatgtaaattcgtattgtatttttcacttatgttattaaatattctatgaaaacatgagtttaatgactaggtaatactcagttgtctgggtgtgccctaatatatttaaccattcctctattattgggcattgggccatttctgattttttgttattataaataacattgcagtgaacagctcagtgttttcctataaggggaagtatagggtcaaagaacgtgaacgcttttaggtgagacttgaacttgagatccctgggttctcctggacagaccgaccaatcacagcttaactgtgggatttttccatgtctcctctctccctgggaaggttgagaagtctctctgccctgcagatccctattcctgcctccccgctgcaattgcacgtcccatttctcctgggccagtcagagtttcattgcctctcatggggcctgctggccacccactcagtggctgcccttctccttaccaccagccttcgtcccctcacctagagcattcacaggcgagcaagagccagtcagagcttccctcagagtagggggtgtagtgataaatgaaatagccctgccttcactcatctcactgggtcgattaagtgatgtgtgatgtacctgaaagcacttcaggaacttaagagtctcatgctctaccaactgagctagccaggtgcccttaaagggctgtcctagtcttaattgtttgtaaagaaataggtagctgggcatggtggctcacacctgtaatctcagcactttgggaggctgaggcgggtggataacctgagcccaggagttcgagaccagcctgggcaacatggcaaaaccccgtctctacaaaaaatacaaaaatttgccaggcgtggtggtgcacacctgtggtcccagctactcaggaggctgaagtgggagaatcacctgatcctaggaaatcgaggctgcagtgagctgtgattgtgccactgcactctagcctgggtgacagggagatcttgtcttaaaaaaaaaaaaagaaaagaaaaaggtataagtggtggtgtccacattgtaaccacagagcccctaaagcagggctgttgacctatggttggcatcctggtcacaagagctctgtgtcagatgtgtgaggggcttgggtgtagttgtcaagcctgggaatgtggctgttagtatcgattggcctcatgccaagcagtgccaagcgccacgtctgctccccagatacctgtgtttgtatgtgtgtgtcatagtcgggaatcactgagaccaggacctctgggaggctgaaccctgggagggcagagcaggaacaggccttggagatgatctaattctgacattttactcagtgaggacacaggtggggcagccagagaggtactcagctctgagtcagggccccatccctcaactcctcagcctgagtcttcccaggaacacaacaggcagctgcttcccagaccttgcagggctccaggtggccttcccctcctgccgactcccttgccaggtttgctgtaactattgctcctccgagcctggctgaaatcatcttcagtctgttatcaccttcagtctgttctcatcttcagtctgttctccacagcagcctgaaaagtctttgtaaaaatgcagctctgttcctccccatcctcttcataacccccttggctctctgctcctcccagaataaatacccacatcctcagcttacccttcaagacgctgagtgacctctagccacagcccttctctctacccacagacagcccaggtcctcattccttgggccttttcacatcactgttcccatcaccctggaatcccactcagcctgcctgggccagaggctacgtaaggtcctcaggaaagcgtctcctggccactcgcacctgactcatgtgctctgagtgccacaccttgcttggcatttgtccttcatagccctggtcattgctggctaatgtagcctggcacatggtggtaggtacttgacaaatatttgttgaacaagtgaatgaaaccagctggcagggaccagaagggcagaggggcagggacagtgtccacaaccatagcccctgtggtcttagctgagaagggctctggctcggtctctggtgagtctctctgctggccggcagaaccaccctaccctggaagccctctccatgtagtgtgaggggtctcaggcccattcaggcttcagtaggagagatctgggtctcttctgggacctgagcaggcctttcctttacctcgttggcatctctcagcattttatttggttttaaaaatgtctcccccttcccccgaccaaccccagattataaaggtatcccacgctcactgtgaagaaattggataacataggaaaatataattaagaaaatcgaaatcacctacagctccacccctcagagaaaagtacccttaacatttgtggccatgtcttttcagttttgtttttatgcatgtgtatgtgctttgacattgctgagcttctctttgtgaaaaccacagatttttcgcagtcttcagtggctgcggtcagaggtggtcagcacgttagtgctcccagtggagaggtgatgcagggatctgggtgcccctttctccctactgcaggtgggtgggtgggcacacccaaggcccccttctgtggcagctttcctatccctggtgaagagtaccctcctgtctctggtctcttctccaggacattctccagccctggaggctgttcctagggggctgcctcttggggcaatgggaagaattgtggaatgcgtgggtggcctcctggctgtcttttctctggttccagcactctctgaacaaaaccagccccaggccactcctggggattggcctcaggtgactctctgggctgactctggccagctagaaggccacccgggcttctcctgtgtccttaagagggtggggtgacctggattggcaaatagtaagcagagaacacggcagagttgctggcctagaaaaccaggtcactaggtcagcacttggattaatgattgataagaaaggttgggagagaatcagccagacccattctcccatgacatccctcacttctgatcccaaaagcacctgccacggagacggggcaacctctgtcttgtatccagaggctgccccttattccgttgcagtatgggaggaaggaggtgacagcaactgggtcacctgcatgtggggcgagaaggggaggaaggtttaggcccttctccctgaaaaaagaagcatgtgcccagagtagggggctccctgccggttctctccccacaattgatggtgaggcagggaactgggaagttctgtctgtggaggtcccttgggtttcagcaggctagcacatttctaggactggaatatcaccatacaatcccttaacacaagccatgggtgataataatagcagcagccactgtggtccttatttgtaggacccttactatctacctggcactgttaagcagttactgcatcgttatttattccacacagcagcctctcaggttaggtggtagtattccagttttaatgtcttccccaagtcataggatgggagggatgagccagggtgtgaacccaggcctgactgaagccggtggaattcacttctttggagtattgcatctcgatggcagtaatatatgaaaactgatacagtggcaagtgctacaactcagaatagtgtggctaaggctcatgtttttagtatatttattcatccagcaaacgtatgttgaggacccactaaatgccaggcaccgtgccaggtgctgggacctacctcagtaagatacagggcattctctgggaaactgataacatggtgaggccagagcagttagcagacattgcagtttggtgtagtgattgcagatctggagggcccgggtcagggttgtggtgagaaggaacagaatggagctagtccaggagagcttcccggaagaggaggtgcagacaggtcgcgaaggagagaaggttttagctagtggaggggatggcattcaaggcaggtgccagttcaagcctccatgctcagggagtgatgtgggatcatgaggcacataggcaggcagagcaggaggataggcctggagagggaggcagggacgagagcctgtggctgtcttcagcacacaggagtcattttctggcagtaatgtccagaagggctttgaccaaggtgttcttgacagaaacagctggggactggcagccagacagaggattcagaggtgatggctccagactgagactaaggagccccagctgggcaaggacatgccagctcctggtccagtcttacccagcaccatatatgaggcacacagtagagtggctaagacttgagccaacctgccttgactcaaatcctgcttctctagttactgtgtgaccttgagccaattactttgcctctctgtgccataatttccacgtcagttaaatggagatgataatagtacctgcctcttagggttgttgtgaggattacatttgccaacatacacagagcatggtgtgtaataagtccttggagaagggaagctagtactattgtgatggaggtggtgatccagcttaggctctggtacagtaagaaggtccatcaggctgtaccatgtggcagatggagcccatggaggatggaggcccctggcacactgactgtccccactcatcccctgggtagggcagaagtgttcccacaccgtacagcctgccagtgggcatcagggaaacacctgagtcaccacgaggagtacgaggcacttgggggttgcccagctgaccaggagcacagagggctgccctgaaagtgagcccctccctactcctagcagagacggggaagggagacaactggacttggtgggaaggactgggccccaggtggcttagttgctctggccccagaccaggtctctctagagctctgggccatttgggttaagcttctaactaccactgcccatgaaattcacctgccaatgggcaatggatggagtcatgcccctccctgcacctaagttctctgaagggctgagtttcttcttggggccagacagtgggtattggaatgggagcatgggggctgcatgtgcactgcaggctttgtgtgtgtgtgtgtgtgtgtgtgtgtgtgtgtgtgtgtgtgtgtgtacacacatacatatatgtcagaattggaatagtccaggggtttgttttgcaagaaatccttttatttttattttttgagatggagtcttgctctgttgccaggctagagtgcagtggtgtgattttggctcactgcaacctctgtctccctagttcaagcgattctcttgcctcagcctcccaggtagctgggattacaggtgcgtgccaccacacccggataaccaggggttttgccatgttggccagggtagtcttgaactcctgacctcaggtgatctgcctgcctcagcctcccaaagtgctgggattataggtgtgagcccccttgcccttcccccatgccccatgcaagaaattattttgctagggactactttttggtgaggggctacattgctgcattcgtgccccctcattctggctcagggcccttgtgttgtctgggggtctgaagctccagcctcttaagtggggcaaagctgtgacatgatcagagggcttctggctctggcatagtgctggggcgtggagaggggagatagccaacactgggagccagaccaaaaaaaaaaaaagccagggttttttgccggcatacaaattaaacttagtgcctggctgtattgtggttgttgttgttgttttgagacagagtctcctctgtcacccaggctggagtgcagtggtgcgatctcggcccactgcaacctctgtctcccaggttcaggcgattctcgtgcctcagccacccacgtagctgggattacaggcgtgcgccaccatgcctggctaatttttgtatttttagtagagatggggtttcaccatgttggccaggctggtctcgaacacctgacctcaagtgatccacccaccttggcctcccaaagtgctgggattacaggcatgaaccaccgcacctggacttttttttttgtttttgagacagggtctcaatctgtcctcaggctggagtgcagcagtgcgatcttggctcactgaaacctctcccctccgggttcaagtgattctcgtgcctcagcctccgagtagctgggattacaaatgtgcaccaccgcacctatctgatttttgtgtttttagtagagacagggttttgccatgttgcccaggctggtctcgaactcctagcctcatgtgatctgcctgcctcagcctctcaaagtgctgggattacaggcatgagccatgcccagcccagcctgtgctatctttagtgccagggcttaagaaaggaagaggagaatagggttcattgcaggaattgtggtgggtggggtggcagctacctgagaaaatctagacagtgggcctaggtccagtgggtcaggggagagagcctaggggtcaaggttgctcctggctgggcaagctgagaacagggagcaaccttggctcagggtagatgacagacctcagctgtagatggagcaaggaggccatatgaaaatggcaggcttctggcaaaatgcagggatgggctgcagcacagcagttcaatctaaataggagcagcccaagggacgtgggtaggttttagaacagccaggctacagctccccttcctcttcactggtgtccttgagaggccacagtcagaagagacaattccaggctagggagagatgtcagcgtgggaactagagaccctggtcccaaattcagaactctagccagagtccagaactgcatctgagtctaagaggcaaccacttacttacacctcccgaaactgagaacagttttaccggttctggtgaaaaaaacccactaccagctcatatgtgggagtgggagctgaggctctgctgagtaacacggcccagtgcacacagctgtcagggcctggcccggctcgagtcctgctgtgtccgaagctctgccgttttctgcttcgtcctctagcatgttctgagatgccctgttgggatcctcaggcctgtcacttttgtcatctgcaaggggggcctataaggccttaatgggggctggcgaggcttgagtgggagcgtgacgcatagtgggagctcagtcagctccctcccctccctccaggatttggtcctgacagggagctccatcaggtcttccccagggtcaccagaggctcagatgctgtgttgtcaagtatatataccaggcagtattgtagcttttcctcctctgttactgcctgctaagcggggaccccacatcttcacgtcctcctcttcctggctctcatcaccacagcctggtgtgcattgccccgtgtccactgacacccacgccacatgggtccaaaaacagagtgtgttctcattgcctcatcccactcaccctgggctctgccgccactgcgctgtggctctcgggggtcccaccatctgacccttgtcacccgtgctgctccttctcttgggactcatcccttctgaggcctcccgtggccccttctcaccctcccctacctcctccatctccaggctttcaatctggtggagcataaagaatcagtgtttctggtacttgttatttggataatggcacctaatgctaaatgacgagttaatgggtgcagcacaccagcatcgcacatgtatatataggtaactaacctgcacattgtgcacatgtaccctaaaacttaaagtataataataataaaataaataaataaataaaataaaataaaataaactttgaaaaaaaagatttcagctaaaattagtttcctctccatgccgagtctgaatatattataaaaataaaagaataattgtctttcacacaattaaaaaaaaaaaaagctgactaatgccactacagtcacacactgctgttggtaattgctagggtcctttttccagtattgtggccaacttccaccccagaaccccactctactcttgagctaagtgtctttatgtctcctattttaaattaggattgcgttcagttgcatgcaacagaaatccggcaatcagtgcctggtaaaacaagtttgattttttcacctaacaagcagtctggaggccggcattgcagggtgggtccagcagctttgggaggccacagtggccaggtgctttcggacttttcacccaccctcctaccctgtcttctgctgctccgaaggcagctgctacacctctaggcatagtattcctgttccaggcaggaagatgggaggggcagaagtttgtctctctattaggaaataatagctttttcggaagctcctcctggtagatttctgttcacatattgctggtcagaattatgccaatgaacactgtagctgcaagagagcttggggaaattgagtgtttaggtaggcacagattgctgatccagagaagactgagactcagaaggaaggagaatggagctggggagaagtaggagtgactgccccagctgccacttggagaaagccacggggtgagcaggacagcacctgtgaacatttcctgtgctctgggtctggtgcttctcaagtttaacacccaggggcgagtggtcagggactgatccttgaggaactgatgtacattaaacaaactatcaagtccctgcaatgcagtgtaaatgagtaaagagcctgcaggggagaaactgccactagtggagaccatgcgagtgggcagccgattgcttggctctgggggtgggtgccagaggcatgcaggtgcccaagggccaggtctgcccaattttcaagagaagccagaaaaccaaaatttttaaaggttttttcgttctaactctattttgaaaaaagttcggtgttacagagtaagttgcagagattgtacagagtccccacatatcctttacccagctcacattaaatcttacataaaggaacactggtacaatactattaaccaaagtcagtgtgttgttcagaccttaccagtttttctgccactgccccctttctgcttcggggatctggtccaggatcccacattcatttagttgtgtctctgtggtctgctcctgtctgtgaggcttcctcagtcacaaagctagaggtttacgtgaccttttccaggttttcccactctaatgatttggaaatcatacatcggcatcttgagacatcttttgagaagtaaagggacttgagctgattgaatgttgatcactccctctcatcttccacattattaagttttgccttcttattttattataatttaaattatttttaagccaggcacagtggctcatgcctgtaattccaataccttggtaggccaaggtgggcagattgcttgagcccaggagtccaaaaccagccggggcaacatagcaaaaccttatccctaaaaaaaaatacagaaattagctggtgtggtagtgcacacctgtggtcccagctacttgggtggctgaggtgggaggatcccttgagcacgggagataaaggctgcagtgagccatgattgcgccactgcactccagcctaggcgacagagtgagactgtctcaaaaaacaataacaacaacaacaaaaaaacccatcagaaaacagctaagagttttgtggtggtgttttattttaggttcagggtacagatgcaggtttgttatgtgggtgaacttgtgtcacaggcgtttattatacagattatttcatcacccaggtactaagactagtacccgatagttattttttctgctcctctcctcctcccagcctccaccctcaagtaggccccgaggttattgttaagtccaagcaagggaaggcctggtggaaatgaatgtgtagccttaacatgttttgtacaaacttggctgtacattacaatcaccaggacaattaaaaaataagaaacccaatgtccaagctgctccccaaaccaatcaaaggagaatctctggggatgggaccaggcatctgtctttttaaaaactccccagtgactacagtgtacagccgagttggcaggtctagagcagggagagagagcagaaggagtctctgatcactccaggttctggttctgatgagtgggtagacaggcaggtgggttgctaaagtaaagattactagaggacgaatgggtttggggaaaatgatgggttctgtttggatagattgagtttgagctgtcggtaaaatatctgagagttggggtcccacagatgcttaacatcttaaagcagatcttttcttctcctgatccttccacaaggtctggtgcagacatttccccgctgggagactctccacagtacctcatgatcttatcatctctgactgtggcatttgtggataatgttttacttgctaagggttggaactgtctcctcctgggtgatgtggacgtggcatcaccacccagtaagttgtcaccttggaaagactccaggatggagcacatcttcctttttctgatgtctctgctattgaggccatggttgcagatctgctgtcaacatgagccaagaacagcagggctttatgtcttttttccacacccaaccactgaaaggatgggactcaccccttcaggaacagtagcacagcagagccgtgattcttgggcctgagtgctgatagggacagggtcggggatgggaggcgtgatgcatatctggatctccaggtgggctggagagttgggaaaagcccctcaagtcattccaatgtgcttcctggagactcagaacagaaggcagcagaggaggcagggaagggtggcacagtgatgtgtcacctctctagtttatggagcctgctccgaaccccacaaacccactacaagagccaggtgggaagggtgatagggcaggtgacttgtgatacaaggagcagagaccatggtatagcactgcaggaactagggaaggagcaggagcagaagaaccccctccatgacagcagcccccaagcgtgccccactcgcaccatcctcttccttgtcactgcctcccctgacctcttcctgtcttctcctctgcccaggctgatgggaaccaccctgtagaggtccatctgcgttcagacccagacgatgccagagctatgactgggcctgcaggtgtggcgccgaggggagatcagccatggagcagccacaggaggaagcccctgaggtccgggaagaggaggagaaagaggaagtggcagaggcagaaggagccccagagctcaatgggggaccacagcatgcacttccttccagcagctacacaggtgaggagaggactggcaggggacacggggcagaggaggcacagcccagtgcagtggggatcctggccctctgcaaacgccatcatgtggggcgcagagtagcagagtgctgaaggactggagccggaagcctgggttcacgcccagtgcggtggggatctgctctgccactcaccagcagtggggcctggagcaagctgcaccacttccttctgtaaaacaggccaaaggatggtaggtgatgtggatatgggctttcgtgagaattaaatgagtgggcatctgtaacacatgtcatcatcattattagtattcccaccactgttaacacaaggcatctgagaccaatctccactaacagcacactagaaagatcagctgtacctgggattgttatgatcagtcgaaacacacagttcaattggtctggtaataattatacacatcatcattgagccgtatcataattagataaaaatgctaagcagttagtatgaataactcaactaatattatttttatgcagccaagcagttgtagcttctcctgtctcacttattggttcccctttatttatcagcagtgcagacagttttctctagtaccctgtactgttctgtcatcttcatcatcatcatgttatgtttaccttcaaaagcacccagaatccatgcagcccctggctttccctgctgcagttccccctgcttttttgtttttgtggtttttgagacaaagtctccttctgttgcccagactagagtgcagtggcacagtctcagctcactgcaacctctgcctcctgggttcaagtgattctcctgcctcagcctcccgagtagctgggattataggcgtgcaccaccacgcccggctaatttttgtatttttttagtaaagatggggtttcaccatgttggccaggctggtctcgaaccgctgggctcaagcaatccacccacctcagcctcccaaagtgctgggattacaagcaggagccaccgcgcctggcctgatccctctgcttcttgctttctcccaccacttctctccttacccaagtgctgcaggcctgcacatgcagctcatcctcgctcctccccttagagggaactcagggtcataaggatatactgctgggagtagacaccctgcactcgctgctgctttcagctgcaggagatcctagccacaggcggtgactcaggcagaggagcaagcccaccccgcagaaatgggctctggacccctgtgactgcatggagcaggaggaggcagttagtgtccaagctaaggcagggtgaaggctgtggaggtagcgcaggctcctgtttgggtctgcagctaagatgggtctgaatcctggagccacaccaccttgaacctgcaaagcaagtcccagaattttgcagaagttcttcctcttcagtgtatagagttgggtggagggagtatagagccatcattcagtccttctcatctcacccaggatcacctgggagtgaccaaagtaggccaaatgtgattctagggccaaagtgaaggtgtccgccattccccgagtaagcaacttcctgtctattggctggtaactgggatggctttggagacacagcctgtctcagaagagaggaacagctaaccaggagtgataattcactcagtgccagtagcacatactgttctaaatctgaagaaggtagggagggttagaaagcaaagggaagacagtggggactaagaatgagtgtgggatgtcatgaggattcaggggagaatgcaaggagaagagacggccacagggtttgtggctatgccgcctgccgtggcccacctcatccccacatctgagcccaggcagatggaagtcccctgcagagcagtgttctgtcctggagtttcctccacaccccttcttgggaccagggctgtttcccaaatagcatcactgttcccgtgcaggccaggtgaggtgcctgggagcaggggtagggtgaggcaggcatggcggtgacctctcaggcagcttcgttgtgggatttagggcacagcgggaaacgtccagggcagaggttgcctcaccagtcacatggtactatgtaggcggtggtgtttaatagattctgtttatcaataagtggatgaagtggagatagacttccttgttcagtcattgaaacaggagagagggttacttgacataatcactttgtgttaaagctgtagtgtatgaaaagttcccaaaaattctacaagacaagcaacctagcaggaaaatcagaacaggtaacagtaagacaaatacgaatggcctgaaatcccgacaggtttttcagtctaaccaactcaaagaaagcaccttaagttgcaatgccatttcacctgtcagatgggtggggaggacttggtcctcccaccaccaggggtgaaagggtagtgtgggccaacacttcttaatgtgtgattctttttttttttttttgagacagagcctggctctgtcgctcaggctggagtgcagtggcacacgatctcaactcactgaaacctctgcctcccgggctcaagcgattctcctgcctcagcctcccaagtagctggaattacaggcgtgcaccaccgtgcctggctaatttttgtatttttagtagagatggggttccactgtgttggccaggctagtcacgaactcctcaggtgatcctcccgcctcggcctcccaaagtgttgggatttcaggtgtgagccaccacacctggccaagtgtgcatttcttttaccctgcattcccacttctaggaacgtgtcctgtgtaagtacttgctcagcatgctcagagattcccatgccagcttatttactgcaggactgctcataagagcaaaaataggaacgtgcccatctgtggggaactggttatgtaaactgtggtagagccatatggtggaatactctggagtcattgaaaaggataaggctggtttatatatatattaaataagttcctgacaagttggggatcccattgtttaaaatccttatgtttcatagaaggcaccggaagagtctataccgaaggactcaggggctaactctgaggagcaggatcatggttaaggaggctgtgtcataagatcctgcatacccttctgtgtttttctcaacaagtctgcactacttccataatttgaaaggcaactgtactttttttaagggtaaaattaactgtttaaaaggggggtgaggatctggcaggtgaggggccctggagacagagcctgatcatgtgtccagagcagaagggcttggagatcacagagaccagggcaggcatcccaggtctgtcactgtgagctgtagccctcgccagtgccatcacttctccaagtctcattctcttcacctttataggctgtgtcctacccagcctgagggccagccaggtgagagtcagtgggggtatgtgacacatcgcaggtctcagcacctgctagttctctgccccatccccatgagttattactttggcctcgggagtcccctgagggacccataaggacagcgcacagctttgagccctgaaacagcaggaaggctccacagtcacccctgaccaccctcctcagcagttcagcactgactctcagtgcagatattgagctcaacacctgccatgcaccttctcaccctccccccagccaggcaggacagaccttcccatcaacaaggaaactgaggttaccagaaacccacttgccagggtcccctgggcgtgtaggagtagagacagctagagccaggattcacctcccattcccattctcatccctcctgcttcagtgacatccatcccaatcacccttgagaaagaggaagataaagtgtccttcctcctggcctcagcacctcctcacttggcaagcacttggtgggcatcaggctgggcccagcactgtgcccagggctggccatacagtggtggacaaggctgagtgcctgtcccaaggagcccacagttcaggcaaacaggacagcagaagtaaagaggctgctcagtaacccagcctcaaatccctgcagaatttggcctgacttcagaagctgctgggtgcttgtttgcctgtgagctctgccagcaaagtaaatagaccaatcgggcgcctcctggctgtcttcacagccatgacaacggcattctcccagcattggaggctagatatgcaggagagctctcagccacaaatgatgtgaataaggtcaatagtgtctatttgctgaacttgtcatcaaagatggtgaaactgatactttactctctgggtgagagggctagtgtttacactgaatccaaacatttggataatgacatggtgcctcctcagcagtgactgtgtcttcttgttcatcataataatgttattgattagcggtactgaacatgtaggtatgcgtagtagtgagatgccgaggttaagagctcagctccaggaattgcatggttctaggttataattcttgctctgtcactgtattagtcagggttctccagagaaggagaacctgtgtgtgtgtgtgtgtgtgtgtgttgaaagaaagagatgtgttttaacgaattggttcacacagttgttggagtggcaagtccaaattttgaaaggcaggcaggctggagagccggggaagttgatgttgcagctcaagtccaaaggcagcctggaggcagaatttcctgttccacagtggggccacggtaggcactcagtcttttttcttaaggccttcagttgttggatgagggccactcacattatggagggtaatctgctttactcaaagtcttctgatttaaatgttaattgcatctaaaaaatatcttcttagtggccgggcacagtggctcatgcctgtaatcccagcactttgggaggccaaggtgggtggatcacctgaggtcaggaattcaagaccagcccagccaacatggtgaaaccccatctctactaaaaataccaaaaaaaactagctgggcgcctgtaatcccagctactcggggggctgaggcaggagaatcgcttgaacccgggaggcagaagttgcagtgagctgagatcgcgccattgcactccagcctggggaacaaaagcgagacttcatctcaaaaaaaaaaaaaaaaaaaaaaaaaaaaaaaaaaaacaccttcttagcacattgtttggtcaaacaactgggcaccgtggcctaatcaagttgatatgtaagaccaacatagccgctgccagcaagttactaacacttctgagccttggagcctcggcttccttgcctgtaaagtgggggtaagaagaccatcttgaaaggttgttttgaggttttacgtgagatgaaatgggtgtccaatggagtgcctttagcaggacacctgcttacccccacctctacccaggacatcatgatgcgggggaagtggtggaaccttcagaacccagcccctagtatgagaagaattctgccatcacctttctttcagcagagagggaagcagtccccttccgtgacagtcacatgcgtgagtgatggctccttccaatatcctgcacttcttactgccccttacctggcgttgctccactctgtctcatgttctagttttcttatctctttctctttttttttctattttatttttttcctgtaggcacaagtgagttacagtaggttaagttacaccttacctttccttgtttttcttgtttatttatttgtttatttatttttttgagacaaggtcttgttctgtcaccacaggctggagtacagtggtgcaatcacagctcactgcaacctggacctcccaggctcaagtcatcttcccacattcaggcaatcctcccacctcagcctcccaagtatctgggactacaggcatgtgccaccacacccagctagtttttaaaattttttatagagatagagacagggtctcactatgttgcccaggctggtctcaaactcctgggctcaagtgatcctcccgcctcagcctcccaaagtgttgggatcacaggtgtgagccactgcacctggccttttgttttttttaagtagagacagtcttgctttatcacccaggctggtatacgatggcacaatcacagctctcctaggctcaaggattttcctgcctcagcctcctcagtagctggcactataggcaggtgccacgacacccaactatttttttttttttactttttatagagacagggtctcactatgttgctcctggcctcaggtaatcctcctgccttggcctcccaaagtactgcgattactggcgtgagccaccacactcagccgagtgcaatggcgcgatctcagctcactgcagcctccgcccccctgcccccgggttcaagtgattctccttccttagcctcccgagtagctgggactacaggcatgtgccaccacgcccagctaatttttgtatttttagtagagatggggtttcaccatgttggccaggatggtttcaatctcttgacctcgtgatccgcccgcgtcggcctcccaaagtgctgggattacaggcgtgagccaccacacccagccctgctgttacctctttcttacctcagctatttgaggatagagtctaggtcctgtcctgcatatagaaggtgcttatcatgtgtcttttgagtgaacacagagggtgacattgtcacgtgcagtgccaacagaaaccaaatgactagacacctgctgaccttccatggccacagggaggatgagaaaggcacctccaggaggtgtgaataatctgagggtattggccactgtggacaagactcggtggtggaagtgagctcagagatccaaagggaacgtgagtagagacatgcagagtctcgcagaggaagcagacgtgcaggccacaaagacaaaattacaagaaatgccccaacacgagcatatgctcacggactgcacagattcaaggaggaagtgccagaaaccctgcctgccccagcatctgcacaggcatccacaaagggtttctgtcatgttatctctttttcttccaacatccggtgctgtgagttttattgtccctgttataaatgcctccaggagtggcaggtcctgcccagccccatcagccagttggtgctgcagtcaggacacccaggcagcctgaggactgccagatgtgcagagagctatcgcgtgcctgctgcgtgcccagcacctcacacagctctcagtgtctgaccacgctggtgccctggtggacaaagttcctgcccttgtggcccttttgtctagtgggtggcttccaacaatgaacacacacaggatatgtcaggcggtgacaaaggctactgagaagaccaaagcggcttcaccctcccagagcacagcttttccctcccaggcccgagagatgtagggagcccactgtcccagtctgggtcaagaggaacagttacaacaccttggaatgactgaagttgggagctaaggtgccaggacaagacaggccattttaggaaccagagacttgtgttacccctaaacctcaccagccaggaggggagcagcccactgggtcctctctgccacagttgggtgcttcttgtgctccccctcctgtggtcaggataggggaagcaggctttcctgctgccactcctaggacccaaggggaagctgggggagtggggagaccatgtgggaaggatggagtgcactttgattggtagcaggtggataggtactcccatggtggggaaatcaaagttgcttggcctgtgtagtagacaggtattaccacaggcctggaaaacattagcctgggtttatctctgtggcttcggtcccccaacatccccttctactcaaaatggctgattctctggtttggaggtttggcacctgcttttggggaggttgctcagtcattagagaagagtgcagaggttggacggtcatcatggcagaggtaggacagctggtatgtggggccatgaaaccagctttgggctaggagtcaggaagctgagactcagttcaggtcccctttccaagatgaagagatcatttccgagtgtccaaagggcactgggaagagaatcctagcagttcttatgaaatcatctgacagcagatatatcctgaagtcatagccttagcaaactgcctttctcgccaacacactcaacaccccgtggttcaaacatctatacgtctgatagaaaaacttggagaaattcagtgtgttgcttaatcaatatgactgatacctaagctgttctactcaagaagttttcatgggaatgaacttgagcttcttgaagagattgtttacagcatccctggagtctatgcaagaatagaacttcctgtgggggatggtggggaggctagctctgcagaggtctacagtcctgcagtttctgcaaaacacgttgcacacatctccatatgggccacacggtggcaacctctgaaccaggagagctgcttcctaagggctaagaccctctgtctgctttctctctcttgctttcctcccaaaacacagccatcctcctccccactgctaccccatggtgagttcagcccaggaagcctctgacccagccctgatggtaatagctgctgtgtactggacatcttctgtatgttaggctctgggagaaatgctgtggagactttttgcccatcctcccagagaagctgtcagtaccccctgttctaggtgaagaaactggtcctcagaaaggttgactccctgaggccacacagctgttaagtggctgaggcgagggctgtggggctgttcccacgccctggcttccaggcctggcagcatgtggagctgcccctccatcgtgtgtccgcagacctctcccggagctcctcgccaccctcactgctggaccaactgcagatgggctgtgacggggcctcatgcggcagcctcaacatggagtgccgggtgtgcggggacaaggcatcgggcttccactacggtgttcatgcatgtgaggggtgcaaggtacggactggggggagcggtggctggccactgaggctgtggtcacatggtgaattgaccctccacaaagctttccttgccttggggtggggccctgactgtacctattgcagaattcctgcccaggaggcagccaggcccttgtgctccagacctcagctctgggcactgcaggagaagagggggttcccttgtcaagcctaccctgctgggcacctgtgttgacccagctctgtgggtgattgtgtccccctggggaccaggcagctagggcagaatgagggtcttgggctgagccatcgtcttacctgaggtctgggtttcttgtttctcaaggctcaaagcgggctctgagaaaaaaggacagacatttgtttttccagtgatatttgtgggtccttcctaacttcacacccatcaaaatctcacagattattttattgaatcaccacctcacaaatacacagaaccagatacatttatgaagaaatcaagttagccgtgagacaatcttatgttaccaaactaacaaagaagctttttttttttttttttttttttttgagatggaatctcgatctgtcgcccaggctggagtgcagtggcgtgatctcagttaactgcaacctccacctcccgggttcaggagattctcctgcctgagcctccagagtagctgggattacaggtacatgccaccatgcctggctaatttttgtatttttagtagagatggggtttcaccacattggccaggctggtctcgaactcctgacctcaggtgatccacctgccttggcctcccaaagtgctaggattacaggtgtgaaccactgtgcctgacccaatttttgtagttttaatagggacggggtttcaccatgttggctaggctggtcttgaactcctgacctcaggtgatccacccacctcggcctcccaaagtgctgggattacaggcgtgagccactgtgtccagccccaacaaagaagctttaggacttctttagacatttaaaatagttgtgttttttttttgttttgttttgttttattttgttttgttttgttttgagatggagtttcactcttgttgtccaggctggagtgtaatggcgcgatcttggctgactgcaacctccacctcccgggttcaagcgattcccctgcctcagcctcctgagtagctgggattacaggggtgtgccactacacccagctaatttttctgtatttttagtagagacggggtttcaccatgttggccaggctggtctcaaactcctgacctcaggtgatccgcccacctcggcctctcaaagtgctgggattacaggcgtgagccactgtgcctgaactaaaatagttttaattaaagttttagaattactttccttctccatctcccctccaaaaaaatttcttctcgttacttccaaatgtcaggagtgtttacaccttatacataatcgggccctttggcacagcctccctcccacctcctggtggcctttcctcacctgttcttggtgcttcagggcttcttccgtcgtacgatccgcatgaagctggagtacgagaagtgtgagcgcagctgcaagattcagaagaagaaccgcaacaagtgccagtactgccgcttccagaagtgcctggcactgggcatgtcacacaacggtgagagctgaccagggcaactcacgggctgctggctccacacagcctgaaaccaaggtccagggagcccttggggcagcctagagggggcacctgtagagcagtgcctggcgcacagtaagcaccatggctgttggctgttggctttgctgatctggaccttggatcttagagcctaagacctgccacttcctcagactgccagcatctaccatgggtcccaggcgtggggtagtgtttacctccctatacctgaggtttacgcattctggcccagaagggaactgataattgataccagcttgaacaatttggggaacaccagtcccagaaactcaagcctgtctcagatgacctgacacagcatgaaagctactgccaaggccaggtggcccttcttggttatagaaggcaggcagtaaccagtaagtaaccacatttgtcaactgccaggagccaggcagaagtttcttggaggtcacccactcccaggagacagagccttctctgccctgtgctccaggcctcctgcagagccttgtcttcggaccccagggtaggatattgcaaagcccacctgtcccctcagtacctctctgagtaagacccctagaggacaggggagagcctcttgtgatctctacaggcaggttagctgcttggccagcttttacccagggatgccctaactgccttgcatcttagagggtagcagtacctgagccctccatttgcggctctcctgggtaatggggtctggcaggtctgggtttgactcctttcttaggaaatctcggaactgactgaatccctctccttacgctaactccaggagaagtcgaattcgtatcctactcaattactaatgacaacaatttttgagtgcttactatgtgaggattcttatttaattgatctaataactcagtaagttttaaaaagtattagcctcatttttctgattaaaaaagaaaagtggccaggtgcagtggctcacacctgtaatcccatcactttgggaggccaaggtaggaggattgcttgagtccaggagtttaagaccagcctgagcaacatagtgagacctcatctctacaaaaaaaaaaaaaaaaaaaaaaaaaatttagccaggcttggtggcgtgcacctgtagtcccagctactcagaaggctgaggcgggaggatcactttagcccaggaggtcaaggctgcagtgagccatgattgtgccactgtactccagcctggatgagagtgagaccctgtctcaaaacaaaaaaagaaaaaggctgggcatggtggcacatgcctataatcctagcactttgggaggccaaggcgagtggatcacctgaggtcagcagttcaagaccagcctggccaagatggtgaaactctgtctctactaaaaaaaaaatacaaaaattagccaggcatggtggtgggcgcctataatcccagctactcgggaggctgagacagagaattgcttgaacccgggaggcagaggttgcagtgagccgagatcgtgccactgcactccagcctgggagacagagcgagactctgtctcaaaaaaaaaaaaagaaaagaaaaagaaaagtgaaggagtctgccccaagtcacaaagctagtaaactgctgagctggaactcaagcccaggcctttgtcaccaaagtctgtcttaccccagctagcgtagctcagtcactcagtaagttagagtccttgtgtgctgggcactgtgaacaaaacagacaaaatcactgctcttgcaaagatacaccaaaaaaaaaaaaaaatcacatcttgtggagcttgcgatctggaggggccaccccatcattcctaccttgctgactctagagcttctgggggccttaggctccaaaaggatttggcccatgcacctgtaaagggatggggatgtcagaggtgctggggcctgcctgggctccttgctgactgcccccttccctgtgcagctatccgttttggtcggatgccggaggctgagaagaggaagctggtggcagggctgactgcaaacgaggggagccagtacaacccacaggtggccgacctgaaggccttctccaagcacatctacaatgcctacctgaaaaacttcaacatgaccaaaaagaaggcccgcagcatcctcaccggcaaagccagccacacggcggtgagtgttgctgctgcttggcctggcagcatcctgggctctgggtcccactgccgcctgcctgactccgggagagccaggccttctccctccctcaacttcatggtgcaggcaagggacatggggagcacagggtgggggtctcccgaggcctgatctctaacggggcctggttttcagccctttgtgatccacgacatcgagacattgtggcaggcagagaaggggctggtgtggaagcagttggtgaatggcctgcctccctacaaggagatcagcgtgcacgtcttctaccgctgccagtgcaccacagtggagaccgtgcgggagctcactgagttcgccaagagcatccccagcttcagcagcctcttcctcaacgaccaggttacccttctcaagtatggcgtgcacgaggccatcttcgccatgctggcctctatcgtcaacaaggacgggctgctggtagccaacggcagtggctttgtcacccgtgagttcctgcgcagcctccgcaaacccttcagtgatatcattgagcctaagtttgaatttgctgtcaagttcaacgccctggaacttgatgacagtgacctggccctattcattgcggccatcattctgtgtggaggtgagtgagagtggggcaggtgggctggcctggcacacccagtcgtcctgggggttggccctcactgcagggcactgtgcctgagctctgacagtgtggggaagtgtccctgtgatcttggcagtggaacatgcaaggcactgactgagcatgcaggatcagctccatctcattatgtacgtagatagaggtggagacaggaaaaagactaagccagacgtggtggctcacacctgtaatcccagcactttggcaggccgaggcgggtggatcacttgaggtcaggagttcgaaaccagcctggccaacatggtgaaaccccgtctctactaaaaatacaaaaaattagccagatgtggtggcacgcgcctgtaatcccagctacttgggaggctgagccaggagaatcgcttgaacccgagaggtggaggttgcagtgagccaaaatcccaccactgcactccagcctgggtgacagagtgagaccctgtctcaaaaaaaaggaaaaggactaacaggcagtatgctgtcatgttaatgtggggtggaaaaattgtctgcattttttctgcatttttaaaattccaacacaataaatacaataataactatgctaactaacagtggtctagagcttacttcatgccaggcactgttcttttcatcgatgatgactcacttgatcctcacaacaaccctgtgcaggaagaatgttttgtgtctccattttacacatcagagaggctgaatgacctgcctatagcctcacaggcagacacaggatttgaattaagcattgagtctcttaaccacaatactacgttgcctaatcgggggggaggtggggacaaattggcaaaaaacaaaagaagtggattaagaccaggggtagggagattagaacacccagtggagcattgctgatgggacagggcttggtctgtcacggccaaggaggcctgccgtcccctgggccaagtcacctcttggggtggaagtaggggagctccactgcctttctgagctccctggcgtgccctgtgtccccacagaccggccaggcctcatgaacgttccacgggtggaggctatccaggacaccatcctgcgtgccctcgaattccacctgcaggccaaccaccctgatgcccagtacctcttccccaagctgctgcagaagatggctgacctgcggcaactggtcaccgagcacgcccagatgatgcagcggatcaagaagaccgaaaccgagacctcgctgcaccctctgctccaggagatctacaaggacatgtactaacggcggcacccaggcctccctgcagactccaatggggccagcactggaggggcccacccacatgacttttccattgaccagcccttgagcacccggcctggagcagcagagtcccacgatcgccctcagacacatgacacccacggcctctggctccctgtgccctctctcccgcttcctccagccagctctcttcctgtctttgttgtctccctctttctcagttcctctttcttttctaattcctgttgctctgtttcttcctttctgtaggtttctctcttcccttctcccttgccctccctttctctctccaccccccacgtctgtcctcctttcttattctgtgagatgttttgtattatttcaccagcagcatagaacaggacctctgcttttgcacaccttttccccaggagcagaagagagtggggcctgccctctgccccatcattgcacctgcaggcttaggtcctcacttctgtctcctgtcttcagagcaaaagacttgagccatccaaagaaacactaagctctctgggcctgggttccagggaaggctaagcatggcctggactgactgcagccccctatagtcatggggtccctgctgcaaaggacagtgggcaggaggccccaggctgagagccagatgcctccccaagactgtcattgcccctccgatgctgaggccacccactgacccaactgatcctgctccagcagcacacctcagccccactgacacccagtgtccttccatcttcacactggtttgccaggccaatgttgctgatggccccctgcactggccgctggacggcactctcccagcttggaagtaggcagggttccctccaggtgggcccccacctcactgaagaggagcaagtctcaagagaaggaggggggattggtggttggaggaagcagcacacccaattctgcccctaggactcggggtctgagtcctggggtcaggccagggagagctcggggcaggccttccgccagcactcccactgcccccctgcccagtagcagccgcccacattgtgtcagcatccagggccagggcctggcctcacatccccctgctcctttctctagctggctccacgggagttcaggccccactccccctgaagctgcccctccagcacacacacataagcactgaaatcactttacctgcaggctccatgcacctcccttccctccctgaggcaggtgagaacccagagagaggggcctgcaggtgagcaggcagggctgggccaggtctccggggaggcaggggtcctgcaggtcctggtgggtcagcccagcacctgctcccagtgggagcttcccgggataaactgagcctgttcattctgatgtccatttgtcccaatagctctactgccctccccttcccctttactcagcccagctggccacctagaagtctccctgcacagcctctagtgtccggggaccttgtgggaccagtcccacaccgctggtccctgccctcccctgctcccaggttgaggtgcgctcacctcagagcagggccaaagcacagctgggcatgccatgtctgagcggcgcagagccctccaggcctgcaggggcaaggggctggctggagtctcagagcacagaggtaggagaactggggttcaagcccaggcttcctgggtcctgcctggtcctccctcccaaggagccattctgtgtgtgactctgggtggaagtgcccagcccctgcccctacgggcgctgcagcctcccttccatgccccaggatcactctctgctggcaggattcttcccgctccccacctacccagctgatgggggttggggtgcttcctttcaggccaaggctatgaagggacagctgctgggacccacctccccctccccggccacatgccgcgtccctgccccgacccgggtctggtgctgaggatacagctcttctcagtgtctgaacaatctccaaaattgaaatgtatatttttgctaggagccccagcttcctgtgtttttaatataaatagtgtacacagactgacgaaactttaaataaatgggaattaaatatttaagagctgactggaa

SEQ ID NO: 36 - protein, 441 aa, Homo sapiens
MEQPQEEAPEVREEEEKEEVAEAEGAPELNGGPQHALPSSSYTDLSRSSSPPSLLDQLQMGCDGASCGSLNMECRVCGDKASGFHYGVHACEGCKGFFRRTIRMKLEYEKCERSCKIQKKNRNKCQYCRFQKCLALGMSHNAIRFGRMPEAEKRKLVAGLTANEGSQYNPQVADLKAFSKHIYNAYLKNFNMTKKKARSILTGKASHTAPFVIHDIETLWQAEKGLVWKQLVNGLPPYKEISVHVFYRCQCTTVETVRELTEFAKSIPSFSSLFLNDQVTLLKYGVHEAIFAMLASIVNKDGLLVANGSGFVTREFLRSLRKPFSDIIEPKFEFAVKFNALELDDSDLALFIAAIILCGDRPGLMNVPRVEAIQDTILRALEFHLQANHPDAQYLFPKLLQKMADLRQLVTEHAQMMQRIKKTETETSLHPLLQEIYKDMY

SEQ ID NO: 37 - DNA, 8491 bp, Homo sapiens
  CDS (61)..(126)
  CDS (1691)..(1818)
  CDS (3314)..(3496)
  CDS (5462)..(5521)
  CDS (6663)..(6758)
  CDS (6840)..(6920)
  CDS (7449)..(7572)
  CDS (7654)..(7980)
gcttccggcggaagcggcctcaacaagggaaactttattgttcccgtggggcagtcgaggatgtcggtgaattacgcggcggggctgtcgccgtacgcggacaagggcaagtgcggcctcccggaggtgagcgcgtctgagggtcccgagcatcgcgccccagggccgcgggctgggagcggccggatggcaggggggcattgtgggaatatcagggggcactgaggctagacaatgggagggacttcccagtgaggaaggggcgggaagtgacgcccctgcgcgccgggggacgccaacacgcccaactctgtggtcaccctgtcggggctgatcggggagagaggggatgtagttccaggaagaggggacgacaggcgcaaagggaggtgggaataaacacacctggagaacgattaggcctgggaggtttccagagccgggccaggacggggctcaaatgccaggctggggagttggcactttatcctgagggtgatggggaagggttttgccctggcgaggggactggacagaatgtgccagaaagatccctccagccactcagaggggaagtggagggatcggctgccccctccacgcactgtgggactttggggaagtcacttcccttttgggtctccatctccaaactttctgcaaacgaggtgaagatggccccattccataaggctggcccatgcattctgactcatgcatttaatgagcgctgatggtgtgcgcccgtccagaagccccactcttcactgctgctgttagtcactttattattattattattatatttttgagatggagtttctctgtcgcccaggctggagtgcagtggcgcgatctcggctcactgcaacctccgcctcctaggttcaagcgattctcctgcctcagcctcctgagtagagtagatgagactacaggcacctgccaccacgcctggctaatttttgtatttttagtagaggcggggtttcaccatgttggccagtctgctcttgaactcttgatctcaagtgatccacccaccttggcttcccaaagtgctgggattataggcgtgagccaccatacccggcctgttagtcactttattccaccaacatttatagagcacttactgtagctcaggcactttctaggtactaaggccacagccaggagcaacacagattaaaaacccctccttctagtaagggagactgactaggggttgcatggaaaccagttggccaagggaggcatcactgtcactgaagtgacatctaagccacaagttacaggaggtgagggagggagccatgtgggtatctgggggaagagcattaaagggtgtggccctgaggcgggactgtgcctggtgtgatagaggaacaaggaggagacctgtgtggctggagcagagtgaggcagggagagggaggagaagagggcagggagggggcaagggaggtagtgcagggcctggtgggccgtgggaagggctagggctttgacaaggcaggtgggaggcatggaaggttgtaggaagaggaggggcatgaggacaagctgccttttccaatccattttcctccctcaggcaagacagggacagctcagtctgtggctcgtgcgtggccttgccacttgggggaactgttttgacccctccgtctgctctctccccccacagatcttcgaccccccggaggagctggagcggaaggtgtgggaactggcgaggctggtctggcagtcttccagtgtggtgttccacacgggtgccggcatcagcactgcctctggcatccccgacttcaggtctgtgattgtgcaggggaagtcgaggcaaggcctaccaggctgccagaggcttccctgcgagccacacacatctgggaatgagaacacatccatctgctttcctcctggatgtgtcctgggtactccctttaagatgtgtcccttggctgggcatggtggatcacaaggtcaagaattccagaccagcctggccaatatggtgaatccctgtctctactaaaaatacaaaaattagccagttgtggtggcacacatctgtagtcccagctactcgggaggctgaggcaggagaattgcttgaacctgggaggtggaggcagtgagccgagattgcaccactgcactccagcctgggcgacagagtgaggctccgtctaaaaacaaaacaaaaagatgtgtcccttgtcacaaccagcattccactcacctcattggccagaacacggtcacctgatcacacctggctgcaagggttgctgggaaatgtagtctttcatatttgcaagcgtagccaggtgtggtggcaggcacctgtaatcgcagctacttggaaggccgaggtgggagaatcgcttgaacccgggaggcagaggttgcagtcagccaggatcatgccattgtactccagcctgggcaacagagccagactccatctcaaaaaaaaaaaaaaaaaaaaaaaaaaaaagccaaggcgtgaatttctcctccttctcctcttccataacctgctgtggctccccattgccaggcagtgtagagttctgaataccttgtgctggaagctgaagcccttcctgccccagccctgaatcacctctccaacttcagcccctcctgctcctgctgcagcccccaaaacacttgcattttctcctaaactcatgggctcttcccagcacccaggcctttgtttaccccttctgtctgatcttccctctcacccttcaagaaactgcttagcctcctccaggaagcccttccacgtgccccagggcccccacctccacggggcttccccaggcccaggtacctcctctgatccaggcttgactcttggggccagaggatctgtgtccacctgtctcccccaagatcaagggcttctggagggcagggcttgggcccatgtgagcatcgtcgggctcattgcagcagcagtgttggttgaatagaataagtcatttttgccttcgtgtgaattcatctctctctctctgcctctccctctctctgtctctctccaattctgtctctgacttgctttgtctttaactctttatctctctgtctgtgtcttgttctatccccctctccctgttcttgcaactcaccctctatttctgtttctgattccctctctctgtctccctgtctctctctgtctcctgattttctctctctccaactttctctctatacctctctgattctccctctgtctctttttctgttcccctctccccgtccatctctcccggcctgccaccttcaggggtccccacggagtctggaccatggaggagcgaggtctggcccccaagttcgacaccacctttgagagcgcgcggcccacgcagacccacatggcgctggtgcagctggagcgcgtgggcctcctccgcttcctggtcagccagaacgtggacgggctccatgtgcgctcaggcttccccaggtaacaccctggccccgcccccacaaaagagcttggggccccacaaaccgtgtttgcatttttagggggagagtccccttttcctggttctataagattctagccctgagttcttggcccagtgtgtggagatctctgagtcccatggctcagagctgtcccggctgaggccagaggcagaatttccctcgagatggggctaaggggaggagagctgtcagggtctagaagttgcagtttgttttttgttgttgttgttgtttttgagaccgagtttcgttcttgttgcccaggctggagtgcaatggcgtgatctccgctcagcctcccaggttcaagcgattctcctgcctcagcctccctagtaactgggattacaggcatgcgccatcacacccagctaattttgtatttttagtagagacggggtttctccatgttggccaggctggtcttgaactcctgacctcaggtgatctgcccgcctcagcctcccaaagtgctggggttacaggtgtgagccaccacgcttggcctgttgtgtttttaatatccatctttattaatctgacactaaacgtgtctgacactgaagtgaacctgtgctctggggcaggctgatttcccaataaaagtgtggccctcccctgcccctctttgccaggtctcacccctggggcaaccaatgacagccaggtcagttgttgagacgaggagctcggcagccaggggtgaggggtgaggaagagatttttctctgcttataaaagcaaacgaggggccgggcatggtggctcacatctgtaatcccagcactttgggaggccgaggcaggcggatcacgaggtcaagagttcgagaccagcctggccaacatgttgaaaccccatctctactaagagtacaaaaattagctgggcgtggtggcgcatgcctgtaatcccagctactcgggaggctgagtcaggagaatcgcttgaacccgggaggcagaggttgcagtgagccgagatggcgccactgcactccagcttgggtgacagagcaagactctgtcttgaaaaaaaaaaaagcaaaggagggtcaggtgtggtgacttatgcctggaatctcagcactttgggaggccaaggcgggcggatcatgaggtcaggagatcgagaccatcccggccacatggtaaaaccccgtctctactaaaaacagaaaaattaggctgggtacagtggctcacgcctgtaatcccggcactttgggaggccgaggcgggtggatcacaagctcaggagatcgagaccatcctggctaacacggtgaaaccctgtctctactaaaaatacaaaaaattagcccggcgtggtggcgggcgcctgtagtcccagctactcaggaggctgaggcaggagaatcacttgaaccccggaggcagaggttgtggtgagctgagattgtgccattgaggttgtggtgagctgagattgcaccattgcactccaacctgggcaacaagagcaaaactctgtctcaaaataaataaataaataaaataaagctgggattggatctcatgcttcagggccattcaatgtctcggtttcttccattataaactgggaatttgaattcctgtgcttctgacctggtgacatcaagaggttcccatatgctctcggagggggacgggcattttgtgagtggaaagggcttcccgttatctaaggtgggttcagccttgggggttaatgattccttgggctcagagaggttggtccacttgcccagagatgcacagcagatgaatggtggagccaggagctagaagagccagaaagaaggagttgatcaatgttgtgggagaggagtccgggaagccttcctggaggagaggggcttagcaccagctccaaagcctgggcatccagggatcctttcccaccatcaagcctcttcctgctcttcccacagggacaaactggcagagctccacgggaacatgtttgtggaagaatgtgccaagtgtaagacgtgagtgccacctgggtgcaggggtgggggctctgccagagggggttgggggtcgaatccgatgtcccagagacccagagggtatggggggactggggtgtggccctcctggggggatctgggggcgtgtctccctcttggggggatataaggagtatgtctccctcctggagggatttggggggcatgtcttcctcctggagggatttgggggggccgtgcctccctcctgtggggggtacatccgtgtcctggcactgctgtagcaacctgccacagatgagcagcgtagaacaatagaaatttgtgatctcacagttctggggaccagaagtccaaaatccaggtgtctgcagggccatgcccctctgcaacctgtaggggaggatttttcctgccttttcctggctgctggtggcagccagccacccttggtggtcctggacctacagccacaggggccttcttatctctgtgtttctccttttttttgagacagtcccgctctgtcatccaggctggagtacagtggggcaatctcggctcactgcaacctccgcctcccgggttcaggcaattattctgcctcagccatccaagtagctgcaactgcaggcgcccgccaccacacctggctaatatttgtatttttagtagagacggggtttcaccatattggccaggctggtgtcgaactcctgaccttgtgatctgcccgcctcagcctcccaaagtgctgggatgacaggcgtgagccaccacgcccggcccagtataacgattaaagtcaggaaaagtaaagtggacatcgccttctctaatcccgaatccagactcggcctgtcgcccccatgctccaattgttcctgtttctcctggtccgggatcccatgctgggtcttgtctctcgagccccttcgtctgtctgggacagtttcctgctttgttttctgtgctccgggcaccgagcagcatcccagcccgttattcatggaaggctactcgttccgtgtcgctgggtgctagttctggtcacctgtccaccccccacctccctgggagaacgtcaccctagaaacagtgcgagagtcacccatgggagctcacctggtcccatcctcccccttcctccctgacacaggcagtacgtccgagacacagtcgtgggcaccatgggcctgaaggccacgggccggctctgcaccgtggctaaggcaagggggctgcgagcctgcaggtgagccacccccacccatgccctgggctccaggggaggctgcgaggcccctgaggactctcctcagcttcctcattgcaggggagagctgagggacaccatcctagactgggaggactccctgcccgaccgggacctggcactcgccgatgaggccagcaggtctgaccccccacccccagggagcccatggtggggcggggcgggacgacagcagaaacacagccagctccagcatgggacagtggctgaggctcacaggcagtgaggggaggcttcctggagcaggtgggccaggccaggggctgcacacacgcactcacacacactcgtcacctcatggctctgggtgggtgctacacaaggaaaccaaggcttccgccaggtgtctcctctatccagtgctgcccagccgggaggtgaccgagccagggtcccaccctaggtgtccaagctcttaccacactgtgatactccccggaagtgtctaagggcccgcccagatcaatgaccccgccaacggaccgcagaggagggcagggcgggatcccaaaggctgactcgggagtggggctggccttgaccgccccggtgagcacagatggcctaggtgtgaaccggcccccagggctggctcgggatgttggcaggagcagggcatcaggctcagcccacgctccccggccccaggaacgccgacctgtccatcacgctgggtacatcgctgcagatccggcccagcgggaacctgccgctggctaccaagcgccggggaggccgcctggtcatcgtcaacctgcagcccaccaagcacgtaggtgtctgagcctacccctgcccagggccaccatgcaccctctgtcccccacgcctgacccgtcccgcccctcggcaggaccgccatgctgacctccgcatccatggctacgttgacgaggtcatgacccggctcatgaagcacctggggctggagatccccgcctgggacggcccccgtgtgctggagagggcgctgccacccctgccccgcccgcccacccccaagctggagcccaaggaggaatctcccacccggatcaacggctctatccccgccggccccaagcaggagccctgcgcccagcacaacggctcagagcccgccagccccaaacgggagcggcccaccagccctgccccccacagaccccccaaaagggtgaaggccaaggcggtccccagctgaccagggtgcttggggagggtggggctttttgtagaaactgtggattctttttctctcgtggtctcactttgttacttgtttctgtccccgggagcctcagggctctgagagctgtgctccaggccaggggttacacctgccctccgtggtccctccctgggctccaggggcctctggtgcggttccgggaagaagccacaccccagaggtgacaggtgagcccctgccacaccccagcctctgacttgctgtgttgtccagaggtgaggctgggccctccctggtctccagcttaaacaggagtgaactccctctgtccccagggcctcccttctgggccccctacagcccaccctacccctcctccatgggccctgcaggaggggagacccaccttgaagtgggggatcagtagaggcttgcactgcctttggggctggagggagacgtgggtccaccaggcttctggaaaagtcctcaatgcaataaaaacaatttctttcttgca

SEQ ID NO: 38 - protein, 355 aa, Homo sapiens
MSVNYAAGLSPYADKGKCGLPEIFDPPEELERKVWELARLVWQSSSVVFHTGAGISTASGIPDFRGPHGVWTMEERGLAPKFDTTFESARPTQTHMALVQLERVGLLRFLVSQNVDGLHVRSGFPRDKLAELHGNMFVEECAKCKTQYVRDTVVGTMGLKATGRLCTVAKARGLRACRGELRDTILDWEDSLPDRDLALADEASRNADLSITLGTSLQIRPSGNLPLATKRRGGRLVIVNLQPTKHDRHADLRIHGYVDEVMTRLMKHLGLEIPAWDGPRVLERALPPLPRPPTPKLEPKEESPTRINGSIPAGPKQEPCAQHNGSEPASPKRERPTSPAPHRPPKRVKAKAVPS

SEQ ID NO: 39 - DNA, 9807 bp, Homo sapiens
  CDS (753)..(893)
  CDS (1205)..(1344)
  CDS (1634)..(1811)
  CDS (2031)..(2132)
  CDS (2333)..(2470)
  CDS (2556)..(2633)
  CDS (4068)..(4175)
  CDS (4249)..(4333)
  CDS (4953)..(5148)
  CDS (5608)..(5793)
  CDS (6360)..(6465)
  CDS (6546)..(6662)
  CDS (7129)..(7293)
  CDS (7376)..(7510)
  CDS (7625)..(7777)
  CDS (8262)..(8375)
  CDS (9000)..(9092)
  CDS (9247)..(9327)
atttttagctctaaagccaccatcctcacgagactctggggccccccaggctcccagacctttgagcaaccttcaccgcacagaaacccagccgcgccctgcaattcccaccgcggaaggtgggtgggttctggttctcgccccacgtttttccccgaccccgatttgggagtaggtgtcaggttcctggtgagggcggggcgggggtggctaggcctgaaggacgtggggacacgggccagagtggctggccccacgcacggacaggagtgaacccgagctgtgagtaggggccggcacagggcggcccgcgggggtctgggccctcagccctgcacaggggcgaggacggcgctggggcccgcgcgctcgggtggggaagggcgggctcccgaaccctgcctctgtccaggccggctccacttccaggggcgcctctctcccctgcccgcgccctcgctgacgccccccaactccaggctgcccttcgccgtccttggggctcctggagctttcaaggcccaaatcccctgcaccacagtggctgtgcccacccggaaggctggcgcgaggatttggcggcggttggcctggcggggggcgcgggccgggggcagccgctagtcgcggggtggggggcgcgaggggtcgcggactggctgggggcgtctcggcgcggctggcggcggggccggcctaagcgcgcccgcgcacccatctgcccccgtcctaggtgccgaccaacccccaggatggcggaagctcaccaggccgtggccttccagttcacggtgaccccagacggggtcgacttccggctcagtcgggaggccctgaaacacgtctacctgtctgggatcaactcctggaagaaacgcctgatccgcatcaaggtgcgcacaggtgcttctcccagagcgtaggcagaggccggctgtcagctgttaagcgctttgttagggtccctcactgcctccttggctggcacttctgcccggtacaggttgtggaagtacagacaccagaggggtgcacaggatgtggtcggacacagggagctgtgggtgtggcggaggaaggagcacagcagggcatcaggagagaaagccttccaggccaagaccaggagccagttcccaagacttcacaggcaggctaacctcccgccttccggctccataagggcgcctgtttctgcccacagaatggcatcctcaggggcgtgtaccctggcagccccaccagctggctggtcgtcatcatggcaacagtgggttcctccttctgcaacgtggacatctccttggggctggtcagttgcatccagagatgcctccctcaggggtaaggagtgaaactggaagggcacaggtgccaccagggagggctgggcccagctcccaaggctgaggttcctgagctgggcagatacaggacagcagccattggcagtcacggggcagccctcccctatgacaaccattgtcttagccctacatccgctcatttgatgcagtcagacatgagtgtgcccagggaggttcttccccttggtgtctcccctgagacagttcacagccacccgaggctggcctcaagaggaccccctgcagcccttgcccctctccaataggtgtggcccctaccagaccccgcagacccgggcacttctcagcatggccatcttctccacgggcgtctgggtgacgggcatcttcttcttccgccaaaccctgaagctgcttctctgctaccatgggtggatgtttgagatgcatggcaagaccagcaacttgaccaggatctgggctgtgagcagcagccagtggaggggttcaggcacctgggttgagactctttggactcctttggggttctgagctagacgggagaggcagacagggcactggtgcctggtgtgtggtttgtcctggaggggctgggatggctctgagggtctcagggagttgctggttggtttccattttttccactggctcccaccccagcactctgctctgtacccccagatgtgtatccgccttctatccagccggcaccctatgctctacagcttccagacatctctgcccaagcttcctgtgcccagggtgtcagccacaattcagcgggtgagggcctcgcttgggcatcccagtgggcaggggaggttggattcaggagatgtttccaaatataaggttctgtgcaaagagtggccttaagggcttgagaataatggggctgggtgaggagggagaggtgggaagaggattaagatagaggcagcccttgccatctggccccacggtgatgataactggctggacagtacctagagtctgtgcgccccttgttggatgatgaggaatattaccgcatggagttgctggccaaagaattccaggacaagactgcccccaggctgcagaaatacctggtgctcaagtcatggtgggcaagtaactatgtaagttcctgcccctgggctcactgtcacctgccatgtgtcctggctgcacccgccccagctctaaccttccacctccccacaggtgagtgactggtgggaagagtacatctaccttcgaggcaggagccctctcatggtgaacagcaactattatgtcatggtatgaactagagcccccaggtccccgcacgtgctcagctctgtcccagctccaaggcaagggatctggaggacagcccagagctctagtagcagcttccgtgggcaagtgggggttatggagtgaggcctgagggaaagggaagagagagaggagatcctagaagagtccagaagcagcttaggggcaatggggatcctaaggatgaggagagtggagaccgccagcctgccaccgcttctcagagtcccggggtcactgcccctgcccagctcgggctctgtcacctctttccttggtttcctcactggcctcctggccatgggttcccagctgtcctgacaccataaccagggaattgtctagaacgtgtcttgctttgtgtccctctgcagagccggacagcagaatggaggccaggctgctgcttttagagctcaggaagtcagtctgcctctgccccatgtaactggcccttctgagtctctgggtctcccagccacctgggctgtatggcatgcctcttctctcctttcccacggtccaaagcacacttgacttgccagagcctactggaattctcctccataagctgtccttccaggaacttacacacaacttgcccatagcagaggttttaaactgctttttagtggtagaacccctttatcaaagcaaaagaagtagaatataagcacataaaatagcttataaaaaggcagctcgggccgggtgcagtggctcacgcctgtaatcccagcactttgggaggccgaggcaggtggatcacaaggtcaggagatcgagagcatcctaacacggtgaaaccccgtctctaccaaaaatacaaaaaattagccgggcgtggtggtgggcgtctgtagtcccagctactcgggaggctgaggcaggcaaatggcgtgaacccgggaggtggagcttgaaatgagccgagatcgcaccactgcactccagcctgggtgacaagagcgagactctatctcagaaaaataaataaataaaaatttaaaaataaaaataaataaacaaataaaaaggaagctcagagccaggcgtggtggtgcatgactctaatccctgcaactcaggaggctgcagcaggaggatcacttagggcgagtaatttgaggctgcagtgagccatgcttgttccgctgcactccagcctgggcgacagagcaagaccctaactctaaaaaataaagaataaagcagctcaggctgaagctggagcagagggttactgcgatcagttgtgcatttctggaggttcaccccggcagcatgtgcaggatgtactggaagagggagacagaacacctcaggcccccgaatagattggtccttgggtcagcaagactcaggtgacacccagacagaggcccccaccccgcgggctctgttcctctgtaggaccttgtgctcatcaagaatacagacgtgcaggcagcccgcctgggaaacatcatccacgccatgatcatgtatcgccgtaaactggaccgtgaagaaatcaagcctgtgagttgcgtcagggttgaaggtgggatgggaggggagacctgagtctgagccatgctgggccttccctcaggtgatggcactgggcatagtgcctatgtgctcctaccagatggagaggatgttcaacaccactcggatcccgggcaaggacacaggtaactgagccccctcgctgctacctgtgggccatctggctggctcgctgccctcctgcctgctcatcaccaagcgtccccagtgtctcagggtcctgaaactgtgaacagtagtcaattgtgacagatactagacatccattgtttacaggcatgatgctggcgcagggaccccacagggcccagagcagagcccctcccctccggggctcactgcgcatggtgaagggagtcctgctgcagcccaaagcttaggacagacccggcgctgccatggagccggcagaggaggggaggggcgcacccaggggtctggcagaggcagcagccttccctgcttctgacactgtatccttaggcggtttgcacaaccctctagtgcgtcgtttcctcttctgtgaaatactttataggattgttggtgttgcgtgagagagagtggaagcacccagcacagggcctggtttaggacacacggatcccatccagggggcaggaaggcccaggcagaggccgagcaaaacagggtctgcaggggtcacctagtgcatgggaggtgggcccttcccaggatgtagctgggggccccgcctcagcttgcccgtggcctgtatcacagatgtgctacagcacctctcagacagccggcacgtggctgtctaccacaagggacgcttcttcaagctgtggctctatgagggcgcccgtctgctcaagcctcaggatctggagatgcagttccagaggatcctggacgacccctccccacctcagcctggggaggagaagctggcagccctcactgcaggaggaaggtattggcctctaggaagggactgtccccaccctgagttcagggctccgtgaggagaggagcgtggccctgcctgccaccctggaactggaggctggaggcacaactaggggaggggcattggtggtcatggcagcaggacagccagcataacctacctctgacgggtggcagccaggtgaagtgtgcagagggtggggacaccctccaaaatagcttggcaccccccacctccaggcccagcctggcacacacacccccacctccaggcgcagcctggcacgcaccccaacacctccaggcccagcctggcacccccacatctccaggtccagcgtggtaccccccatctccaggtccagcctggcaccccacccccatctccaggtccagccaggccctcagaggcaccctcatcccaagtccacgtgcccactgcttaccctgccccatgcttcagggtggagtgggcgcaggcacgccaggccttctttagctctggaaagaataaggctgccttggaggccatcgagcgtgccgctttcttcgtggccctggatgaggaatcctactcctatgaccccgaagatgaggccagcctcagcctctatggcaaggccctgctacatggcaactgctacaacaggtacggcagccccagccccacaggttacagcttaaggttaaaagttagggttatggttagaggattaaagataaaagaaggtagggttatgagctgggtgcagtggcacacacctgtgatcctagcactttgggggccaaggcaggtggatcacttgagtgcaggagctcaagaccagcctgggcaacggagcgagaccccttcataaaagtagttaggattgtgattagtggttgggtagggctagtggctagggttaaaagctagggtttgggttatagaatagggttaaaagccgggcatggtggcaggcacctgtaatcccagctagtcggaaggctgacgcaggagaagcccttgaacccgggaggttatgggaagctaagatcacaccactgcactccagcctgggcaacagagcaagattccatctcaatttaaaaaaaaagtgagagaaaaagagagagagaatagggttagtaattagggttaaaggttggggttgcaggtcaggcacctctggacattcccagctttggttcttcatgtgtctactcttcctgcaggtggtttgacaaatccttcactctcatttccttcaagaatggccagttgggtctcaatgcagagcatgcgtgggcagatgctcccatcattgggcacctctgggaggtaatagccttgcagagggaacctgcagggcaggctgtaggggatgaggccagcctctcagtctcatcctctccctgcagtttgtcctgggcacagacagcttccacctgggctacacggagaccgggcactgcctgggcaaaccgaaccctgcgctcgcacctcctacacggctgcagtgggacattccaaaacaggtgggttggaagctcccagagcaggtgtgagaccacaaagcagcaggtgggtacagccccgacgaggcctgagcctcctcctcccctgctggcctcactgcctggcccagccctcgggaaggcacagggcacgtctcaggatacctgtagagtccaaactggcttcagggaggacagagaccacccaccgcccctggggccatctgtgtttagagacagccatgagatggaggaggcactcacaggcccctggagcattttcagcacttccctcttacccacaaagctgagcccggcctctgggggctgattctccctcagactgtcttttgcgtaccctcctcctgaagatgtcttggccggctgtgccctttctccaccagctaaacgtcatgcctcctagacatgacccagagtcctgcttggagagccctaccctcagctgacccttcccatgtcttggcagtgccaggcggtcatcgagagttcctaccaggtggccaaggcgttggcagacgacgtggagttgtactgcttccagttcctgccctttggcaaaggcctcatcaagaagtgccggaccagccctgatgcctttgtgcagatcgcgctgcagctggctcacttccgggtaggagccccgcctcccgctgctgagagggcagggtggtaccagggtccacctgccagattcacccctctgtatatcccaggacaggggtaagttctgcctgacctatgaggcctcaatgaccagaatgttccgggagggacggactgagactgtgcgttcctgtaccagcgagtccacagcctttgtgcaggccatgatggaggggtcccacacagtaagtgtcctctgcccatgtgggggtcacagtcgtcgggtgaggtgccccctctgcctcctgtctgcctggagggccagggctactcttcacccctttacttctgccccgcagaaagcagacctgcgagatctcttccagaaggctgctaagaagcaccagaatatgtaccgcctggccatgaccggggcagggatcgacaggcacctcttctgcctttacttggtctccaagtacctaggagtcagctctcctttccttgctgaggtcagcaccgttgttgggtgtgtcctttgtcccactgccctcctacacgcagggcttgggccatctcatgatggagcacggcctgttttcctggcttgctcccctgaagctccctggagtgctgggccagctttcccgcccacaccccacctgggcctgtggtcctgggactgagcaggagcaacatcctctttgtggtgttggtgtccttgtgacagggaacagacaaatatatgatctgtcaggtggtgacagcactactgagactagtgaggctatgtgggggagaggcagagcagagggagggctgggcagctcacacaagccttatgtggcatgatgcacaggggaccacggggtggtggccagggagctcctgcaccctcagcagaaccgtgtctggctcagagtaggtcgcagacaccacgtgttggacaggtgctttgggtatgtggcctctgaccagctgtggcctccattgcaggtgctctcggaaccctggcgtctctccaccagccagatcccccaatcccagatccgcatgttcgacccagagcagcaccccaatcacctgggcgctggaggtggctttggccctgtgagtgctcctgaagggggtgggtgggcagcaccagggccctgagggtttcagtggcgagtgcaggccctgaggtcagacgagaggcaggagcaccttgcttagaggagagcataaccccagacctgcatggaagcagaatgttagctatggactcaggcagccaagcacctgggacccacccatcccaaatacctccctgctgaagcatgaccgtggtttccggggtactgaagcatgactgtggggctggtttccagggtactgggcagtgcactgggtgcttctgaagtctacttatccaagagagtgcagctgtctcccacagaaaccttcacatgggctagcttgtcagaaggctagagaaccctctggagagagacggagtgatctagagaataagccccctgagggaaactgggaggtcccagatcccttggcggggtctgggcagcattctttggttttcacagtttcctgggggtggtcctcaggaaaaatgcagtgtctagggctggggcccgttcctgcaactcttgtgggaagaacaagtacaatatcagcttggctttcagatcttcaaggtttgatttatgccttcttcacccttcttgttgccctcaggtagcagatgatggctatggagtttcctacatgattgcaggcgagaacacgatcttcttccacatctccagcaagttctcaagctcagagacggtgagtctcctgccacagctcaggcctgaggaaggggtgccacctggggctgcccaggaacacaggtgtctttggctggggaggcatccttgcttgtgggaacagaggggtgggtacatatctgaaggtgcatctgaactcttggctcccacagaacgcccagcgctttggaaaccacatccgcaaagccctgctggacattgctgatcttttccaagttcccaaggcctacagctgaaggttggagaaatgccagctgccctttcgtccccacactgtggaggaagggacctgtggcagctcacaggcatgaggggtggccgtgcacaggtgcccaggctccaaggacagctccggcagcaggtcctcgctgggcagatgctgctccctgagggcccaggtggtggaggtggggttggagcaggaagggaattttgatttttttttttcttgatagatactaataaaaataaggctgtgtaattttctctcagcccttaggtacctgtgttttgtttgggaactcggaggccctccccctcccccagctcagaccacagaggtggcaagagaagggctgaagctggaagactgttcatgagggacttgtgtgacctgctttgaaatgtgtgactctgctgagtgacgtaggctctgagatagctgtccacgcccacgtgtttgcttggaataaatacttgcctcagaaccttca

SEQ ID NO: 40 - protein, 772 aa, Homo sapiens
MAEAHQAVAFQFTVTPDGVDFRLSREALKHVYLSGINSWKKRLIRIKNGILRGVYPGSPTSWLVVIMATVGSSFCNVDISLGLVSCIQRCLPQGCGPYQTPQTRALLSMAIFSTGVWVTGIFFFRQTLKLLLCYHGWMFEMHGKTSNLTRIWAMCIRLLSSRHPMLYSFQTSLPKLPVPRVSATIQRYLESVRPLLDDEEYYRMELLAKEFQDKTAPRLQKYLVLKSWWASNYVSDWWEEYIYLRGRSPLMVNSNYYVMDLVLIKNTDVQAARLGNIIHAMIMYRRKLDREEIKPVMALGIVPMCSYQMERMFNTTRIPGKDTDVLQHLSDSRHVAVYHKGRFFKLWLYEGARLLKPQDLEMQFQRILDDPSPPQPGEEKLAALTAGGRVEWAQARQAFFSSGKNKAALEAIERAAFFVALDEESYSYDPEDEASLSLYGKALLHGNCYNRWFDKSFTLISFKNGQLGLNAEHAWADAPIIGHLWEFVLGTDSFHLGYTETGHCLGKPNPALAPPTRLQWDIPKQCQAVIESSYQVAKALADDVELYCFQFLPFGKGLIKKCRTSPDAFVQIALQLAHFRDRGKFCLTYEASMTRMFREGRTETVRSCTSESTAFVQAMMEGSHTKADLRDLFQKAAKKHQNMYRLAMTGAGIDRHLFCLYLVSKYLGVSSPFLAEVLSEPWRLSTSQIPQSQIRMFDPEQHPNHLGAGGGFGPVADDGYGVSYMIAGENTIFFHISSKFSSSETNAQRFGNHIRKALLDIADLFQVPKAYS

SEQ ID NO: 41 - DNA, 15121 bp, Homo sapiens
  CDS (2985)..(3057)
  CDS (3770)..(4339)
  CDS (7124)..(7246)
  CDS (7343)..(7465)
  CDS (7558)..(7680)
  CDS (9984)..(10397)
  CDS (10497)..(10649)
  CDS (14552)..(14659)
  CDS (14742)..(14797)
aagtgccttctaagcttccaatgaattccggctgtggagtgtggctgccccggtctccccagtctcccgctgtagctgaattccagcctggcccgcagctagccctgtctgcagctccaagcgtggtaggagcagggggtgctgggtttgccccccctcaggaggaaggggggatccctccctgccagtgggaggggttgcagcctgcacttcccctccccacccgccagccctgggttaaatgcggccgttgcctctgtgtgctccagctgcctggcagtccccacctagggcacgctgccacgccgccgttacctggtccaagtgcccgggaggctccgcctgtcggcttcgctctgcagctgcatctctgatctgtcctgcaggctcaggtgagtcaaaggattgggaggcactgaggggtctgcaggggagtaggcatcaagccaggtcaggcgagtgtattttagcagagacgctgcctagggtgccctatctgatttgcagtgcccttccccacttctgcagggtcctttccaaatcgagcccccaccctcaaagccatcaaaataggatcatcccttttctactctcatccctccaggaaccccctgaaatgtccctaagggacttttgagaatttatttacaggcctctcctcccttgctgctccactccctcaacctcacctcagggcatctctgaatctttctttttttaatgcaaggattaactcctcagaggaatcccaggttctagtatcagtcctgccacgacatcgccatgtacccttcagcaagacactaccctctctggacctagttcctttctttgtagaatgaggggtttggaaaggtgatgaactttgaggcatttgctattttgactttctaggattcctggggtggaggcagggtgccaggtgagaagttggctcagaccaagaatgggatgaggggaaccttaaccaagatttaggggcccagaggcatctccgggtaggaaagtatgggaggtggcagaggccccttgtgccttagccctcatgctgtccagggatgttggctttgcctgtggcccaagcttgacaagggttccccgccctcccacttccaccagcgctgccacatcttgcttggtcaccctcccacgacgggccctgccagaggatttatgttcttctaccaggcctgggaggggaaaagggagaagaatccgggatgagaaggtcgcctggagtgagaagcaggcactggcctcgctcagaataggcgcattcacggaattggggggcgggggcggagctgctgttgggttaggggcagctggccctctctgccaagaaacagcaacagaaaaatggctaacacagcttcagcatggggcgcggcggtggggtaggagctggaaggaaatgaggtttagtgaattctaggcgccagggggcctcaagagagagaaggggaaccaggagccctaggttctaatcctgcttttgcagttcggcgggctgcctccttggggcttagttttcctatttgtatagtggggagggggtgggggggtggtccttcgtagttctcacggggcgtctccggggcctcgggagggtaagcgctcacctgctgcccctgcggggtccatggtggctccacggggccccagccgctcacccgccgccctctggacgagtccagtgctgctgtcgctggaaccctgcacacccctgctcctcggctcttgcgcgggttatatcctgtccaggccttatctccaaggccccgggccccggccccctgtttgctcggggtgggcgcacctgctgggcagatgtgggcttcccacgccccctgccatctcgggcgccccctggcggtcgctcctgagagcaggcgggaaacaggcgccaagccgcgcgttctcgtgcgcagtgggttttggtccactcgctgccacgccaccacgctcagccccgcaacagggcgcagcccctccctgccgcctgcggttgggcagtgcatgtctgtgtttgtgtgtgtggaggggtctgggggggttggcgagttgcaaagacagccacacagaagcctgtgtgcgtaggggagtgggccgaggtggggaagggcttctgtctgcagaggttcgcctggcaggaggagaggcaccaaacgcccaggctggctcacagaaactagcaggcgtgggattgtatcctgccgcagccactttttggccgaatgactttgggtaccagcgcttaacttttctgagcctcaatttcattgtctgtatgatgggggacaatcacagccttagtcttacaattgcagagaggattaaatgccacaatgcgtgaagagcatttaacactgtgcctgacatttaaggaagacctgtttttttctgtttaaattttgcatatttgtatctatgtatctattcttatttaccattctcttgtgggccgagcgcggtggctcacgcctgtaatcccagcattctgggaggccgaggtgggaggatcacctgaggtcaggagtttgagaccagcctgaccaacatggcaaaacccgctctctactaaaaatacaaaaaattagccaggtgtggtggcaggagcctgtaatcccagctactcgggaggctgaggccggagaatcgcttgaacctgggaggcagaggttgcagtgagccgagatcatgccactgcactccagccgggacgacagagcaagactctatctaaaaaaaaaaaaaaaaagaatctcttgtgtttcccagcaatcccactgtgatgagaattttttaattctgaaacatttcaaacatacacaaaaatagagagattagtaaaataaacctgtaactgtcttccccctccaagtgcctatcacccagaataagagctctgtaaatactgttgcttttctattttccttcctccctccaggctctgacacctccattctctgtccccaagcgccatgagaggccttctttgctggcccgtgttgctgctccttcttcagccctgggaaacccagctccagttgacaggtgaactggggcccagccctcaccagtgggaggaggggagcggaagcaggtcctccctctgcagccagctcctcctgctggggagagggaagcaagggctttggaacatatgggactgggtttaagttccccacttcacctttctgggcctcagtttcttcatctgtaggatgtggcttagttttgggcgcatgcagaactgcccatggggtgtttaatttggaaaaattatttgaaaacatggaaaaaaaccaggaaattttacataaaaatccctgtttagtatttctcttgaaaaaccagggatctgctgacatccaattcgcaggggcatggcctcatttggatgcagctacctgcccaatttaggagtgataggggctctttgggtctccagcgtcctaacccaaccagttcatccatgttccctgcctggtccctgcaggctttgagtttgcgacgcttccttgccccctcgtcaatgggtaataccgcctcagaatagccctcagatctgtaagatgagggaatttgtgaaatctcctagcccaggtgctaggcacatgccgggcgagtgcatctgtctaatctgcgtttgctgtgctgggcgctgttatgtcggcatagcggcatttcccctgggtttcctagggggtctcctcggaggtgaggctttgctgacctaggagagtcctccctgatctccccgcaggtcccaggtgtcacactgggcccctggatctggtgttcgtgattgacagctcccgcagcgtgcgccctttcgagttcgagaccatgcggcagttcctcatgggcctcctccgaggcctgaacgtgggtcccaacgccacgcgcgttggcgtgatccagtattcgagtcaagtgcagagcgtcttccctctccgcgcgttctctcgccgcgaggacatggagcgcgccatccgcgacctggtgcctctggcgcaaggcaccatgacgggactggcaatccagtacgccatgaacgtggccttcagtgtggccgagggcgcgcgaccgccagaggagcgcgtgccgcgtgtcgctgtcatcgtgacagacgggcggccccaggaccgcgtggccgaggtggcggcacaggcgcgcgcccgcggcattgaaatttacgcggtgggggtgcagcgcgcggacgtgggctccctgcgcgccatggcatcgcccccgctagacgagcacgtcttcctcgtagagtccttcgacctcatccaggagttcggcctgcagttccagagccggctgtgtggtgagttaggagggcgctggagtgaagctcgaactctcaatccaaatgcttggattcctttcccaccacagtaaatcccatcccgtgggggtggccccgcgatttccaggtagagttgccctgacctaccgcaggctgtgtcagatttcagctctgaccacttctgctcagcctccatcaacaaggagcaacctataatttcttgccctacccgccacagcttaccacaggcttaatgtcaaattccagcaccaaccccctgcacacacggaaccagtgattctcaaagctaagagggatcggctgctccaaagagtcgtggccctcccacatggggatgacttctcccattatcatcttagctcctcccacaaatgctgcaagatctgttctgatctgttttgagtttattccgcccacctcgacttagcacctctccaccttcctacccactcctgcccctgtgtagtcctgtcccagcccactgacgtgtctaattgagtgtctcctcttctgagcctactcacaggggctccttaagccttattctttccctaagccctctcacttggtacggcccttctcaaattagtcatttccttctgaaagccatttgagggtgatgcctgcctctgaccccatccccatccagctctctcttgttggaggcttctgcccatctgttccctactgattctagtcctgtgtgtcctcagggaaggaccagtgtgctgaggggggacatggttgccagcaccaatgtgtcaatgcctgggccatgttccactgcacctgcaacccaggctacaagctagcagcagataacaagagctgtttggatgacagctatccctgtcctgcaatctcactgctcctgaaccttctttggctctccattgccccaacatcagaccaatgagtctggaagggcctttggcagtaaaagcacacctccatcactttacaggcctaagaaagaaaggtattgcctggggtcacataagtccctggtgggagcccacagttcagtgtgctttctgccctctttctccctgttttcaggccagtctctaatcaacctcccaaacttgtttctgttttcttcttttcttttctctctctcttttttttttttttttttttttgagacagagtctggctctattgcccaagctggagtgcaatggtgcgatcttagctcactgcaacctccgcctcccgggttcaagtgattcttgtgtgtcagcctcccaagtagctgggattacaggtgctggccaccacacccagctattttttgtatttttagtggagatggggtttcaccatgttggctaggctggtctcgaactcctgacctcaagtgatctgcccgccttggcctcccaaagcgctgggattacaggcgtgagccactgcgcccggccatttctgtcttcttacaggcacatccttacagtttctcttcttagatactgttggggggtcttcaattaggtgggtgtcccccctcatgccacccattcttgactctgcacctcagctctttgtgtgctgctcacctgagctgcccttgccactcccctctgcctttgcaaatctttcaagactctctctttttaagagatagggccttgctatgttgcccaggctggtctcacactcctgggctcaagagatcctcccgccttggcctctcaaagtgctgggattacaggtgtgagctgcttcttcatttttgtcttctgaaaagctatggcatagaatacctcgcttattcaattcagttttttactgagtaccaagttagtattagacattgtgctaggagcattacacatgttattatctctcagcctcacaacaacctggaaaaagaaatcatgtaatcccaataacccagatgtcagctggggtcttcttgtttctagaaactaaaagttggcttgaactctgatttgatgactgtttaacattcaaatctctctccaagacctctggaaatcccccaagtgcttatcttctggttgtcacctcttgctgtgagcctctgctaaattcatttgatttatggatcctctctcatttctcaaccctgcacatgctgttcttgttccatgcatgttaatcaacctcttcgttggtttacacacttgtgtatgcaggggcatacacaagcgtgtatgtgctaagtaactcatagcgcgtgcacacacacacgaaaaactcattataattgaatattagacagctttgtttctgaaagtcctcagtcagcctagtacaagggatttttcacaggcagcctcaacccacagagttactcatcttcatactggctctcttgttcttttttttttttttctttcctctctccactctcatctcctttccaggaaccccaaatactcacttttttatacagggtaattatcttctctccagtccagctctcggccatctttgcctatccagatcatcaagatgctcaacagggcaatagttccccatcttccatggaaggaagctgtgaatagcaatcactgtcttccattatattcccattttgcaaatagaaaaatggaggctcaaataggtaaagtggccaaacctgtcctctgtaagtcagagagcatcttgaggacaggggccctgactaattaggtcaggatttttggggttggggcccaggcgtaggtattctttaaaatttccttaggtggttgtgctaccagagctgagaagggcagtcctgggcatagactgaccccatttcttcctcagccattgatctgtgtgctgaagggacccatggatgtgagcaccactgcgtcaattccccaggctcctatttctgtcactgccaagttggctttgtactccagcaggaccagaggagctgcaggggtgagcaacacccccaccctcccaccacaccctggactgtggcctccgagggctccaatcagaggcaacatcttgctgtttcttccctcctgccagccattgactactgcagctttgggaaccatagctgtcagcatgagtgtgttagcacccctggtgggccacggtgccactgcagagagggccatgacttgcagcctgatgggaggagctgtcagggtgaggagggctctcctacatttgtgggaggggtaagagatcttagctggtggggtccatcctgactcatcctgacctgtctctcctttcagtccgggacctttgcaatggcgtggaccatggctgtgagttccagtgtgtgagcgagggcctctcctaccgctgcctgtgccccgaggggcggcaacttcaggcagatggcaagagctgcaaccgtgagtgatgggcgggagggtgttctgttggcttctgccccattgcccacatttggagtgtccttgactttgccattgctgtggcccctaggctgtggtgtgaatgtctgtgtgtgttgtgggggtgacattggagggtgtgccattccctccttccatctctttcctacaatcctctactctgctgtcaatgttaatttaaaaatacatatttgatcacattcctcctttgtgcacaagccttctgtggctcaccaatgactacaggagaaagatcaaatgacttacccctaagtatttcaaatggtgagcagaaccacattaatgaataatgaaatcaaattactgggttacaaccaacattaaaaaaaaaagagtggaagacaatatagagtttactgcctgtagaaagagttatattatttctgaaattttagttctgtgtgaaatgtctcatgatgtattgtcattattattatttttactgtgggctgtgataaaaattttgaaaccactgccttaggtcatcacgatctagcttcagccaactccatctgcccatctcctgccacacttgaacatttcagtcttactggcctgcccctccccggatgtgtcaggatctccccagatcccaagcctctgcacgtgctgcatctcaccttctagactgtcccttactgccttggcaaactcctactgatctttcaagactgtcttagatcattcaggctgctatatcaaagtactgtagactagacatttagttttcacaattctggaggctgaggagtccaagaccaaggtgccagcagatatggtgtctaaagaaggcctgttttctgattcttagatggcacacctttcaaagcctccccacgccaacacacacacacacacacacacccctacacacacacacccacacacaccaattttcttgctgtgtcctcacatggtgaagacaggaagcaagccctcttcgacttttttttttttttttttttttgagactaagtctccctctgtttctcgggctggagtgcagtggcgcgatgtcggctcactgcaacctctgcctctggggctcaactgattctcctgttacagcctctggagtagctgagactacaggtgtgccccaccatgcttggctaatttttgtatttttagtggagatggggttttgccatctcagccaggctggtctcgaactcctaacctcaagtgatctgcccgcctcagcctcccaaagtgctgggagccaccatgcctgacctcttcagactcttacaaggacagtaattttactcataagcgctgtaccctcatgtcctcatctaatcctaattaacctccaaagatctcacctccggagactatcacataaaggcgtagggtttcaataaatgaattttgggaaacacactcattcagttcataacaaagatcagatagaaggccatcatctccatgcagccttccttaacaactccaggaagaatacactattcctaccttgggatccctgcatgatcttctcttctagcactttccttgaccagagcacatagcatgtctgacttgctctgctctgtcctcatggaacaggattatgttttaattatttcaaaacctttgaaaacctccccacgccaacacacaccacattttgggcctagcaactttcctggctcagaataggggaggtgacattgtagagtcattcaggagcatgggttttggagtcagatggacctggcttcatgtcttggctcagtcagtactagctatgaaatctggggcaatcactttatccatcagaacctcaggtcatagaaaatggggacaatattcaagcttattgggaggattgagaatatatataagcacttcacccagtacctaccacatggtaagctgtcggtaaataatgtttttgttattattattgttaatactggtagagtgcttagaagtgtgcctgatacatagtagatgatcaataaatggtagttattgtggtcattactatgattgttgttaaaaaaagatgcttttagcagagtggtttgttctaagcactgaataaatgtcaagggcgatgatgagggtgatgatgatggtgatggtgatgatgatggtgataattattattacttagcacactgcctggcacaggaaggactcaggaaatgttgtctgttatataataaatgtttgcgaatgaacgactagatggatagacagctgctgccagtccagaatctggtccctcaattcaagcttttctggctgtgcagggtgccgggaaggccacgtggaccttgttctgctggttgatggctccaagagcgtgcgtccacaaaacttcgagctagtgaagcgcttcgtgaaccagattgtggacttcctagatgtgtcccccgagggcacgcgggtggggctggtgcagttctcgagccgcgtgcgcaccgagttccctctgggtcgctacggcaccgcagccgaggtgaagcaggcggtcctggccgtggagtacatggaacgcggcaccatgacagggctggcgttgcggcacatggtggagcacagcttctccgaggcgcagggtgcacggccccgtgcccttaacgtgcctcgtgttggcctggtcttcacggatggccgctcccaggatgacatctcggtgtgggcagcgcgcgccaaggaggaaggtgggcttggcatgggacacagtgggctggggttgggtcagacgctgggaggcagctttcccgaggcctggggcaccctctgagaccccggccttgcaggcatcgtcatgtacgccgtgggcgtgggcaaggcggtggaggcggagctgcgcgagatcgcctcggagccagcggaactgcacgtgtcctatgccccggacttcggcaccatgacgcacctgctggagaacctcagaggcagcatctgtccaggtgagcgcatctctctcggggctcctcctctctctcattgcccgtcctctgatatctccccttcctattcactccctgcccactttgtagttatagccagaggttgggctcactagacagagctttgctactccaaatgtggtctgcaggccagcggcagggcggtcacccggtagcttcttagaactgaaacatttctggtgctctccagaccgaatgaatcagaatttccacttcgacaagattctcaggtgatttgtaagcatattaaagtctaagaaatcctagactaggctacctgtcccccaaatcagtggaggttcagaataatttgggaaatttttttgaaggcacaccagacagcatttgtaagtggagccacagcatatatccctgaacttgttagaattcaaccttatgaacttggcaaagtggcaggactgaatatattttaagtatgcaaagactttttttttttttattggggacaacatacctcataagtgcaatccctctacttcatcatctggtgctcagctgaggaaaaagagactgactctacctgtgaagaaggggactcttgaatcgcatgcagtgtactgtgctctaggtgatacagggaatgtctccagggtaacttttaccctagagactttagacactagcccaggcttaagatgtgactcttcttcccatttatcagactgcagctccagaaacagactaagtagggctggtttgggtctggagaatttgcctttttttttttttagatatatgtaggggggctgggcgcagtggctcacacctgtaatcccagcactctgggaggccgaggcggctggatcacttgagatcaggagttcgagaccatccttggcaacatggtgaaaccctgtctttaccaaaaaatacaaaaattagctgggcaaggtggtgggcactgaggcaggagaattgcttgaacctgggaggtggaggttgcagtgagccgagattgcactactgcactccagcctggtgacagagtgagaccctgtctcaaaaaaagtatatataatatactatatatactatattatataatatgtgtttgtgtatgcatgcacatgcacgtgcatgtatatacacatacaaatatacacatacagtccttcccccaactctccttccctccccgctctcagccaattctaattattgtggctctttcagattaggggctctttcagagctcttcctatgtgactcttatgggccctgcagtgtgactttggacgagtcacttaccccacacctaccttaacttttctcttcggtaacaggagaggcactggctgcccaaggttacctctagttctagagttctaagagaagtctgggttttgtggttgaagctctttatcaattggtggtatgactgttccctgtctccaaccctttgtttagagaaacaaatctgtgaagttaggggtctttgctggattccagcagtttgttcatagtacatataagactaagatgaagagacaacttttaaatcattatggcagtgttttcaaaggttaaatggcaggtattgtgcttattatttcaccacgtgtaatcctttttcttttttttcctaaggtacttttattgtagcattttttttttctatgtcattccctgtaatctttttttttttttttttttttttttttgagatggagtctcgctctgtcatccaggctggagtgcagtggtgcgatctcggcttactgcaacctctgcctgccaggttcaagcgattctcctgcctcagcctctcgagtagctgggacaacaggcgcatgccaccacgcccggctaattttttctagttttagtagagatggggtttcaccgtgttagccaggatggtcttgatctcctgacctcgtgatccacccgcctcagcctcccaaagtgctgggattacaggtgtgagccacagcacctggcctccctgtaatcttaacaatggcacatgcttatagaatttcagtgaatctaagataccattcattttaagattcatcactaccttatgtactgctaagaaaaaacatgtgccagttttaattgtaaggcctcctgcccaacccccaagatgttgatgtgtggggagatagagttggatcaggatcagtggttcctaaaaattaggtcacaccagaatcacctggtggacctttaaaaacacaaattgcagctgggcatgatggctcatggctgtaatcccagcactttgggaggccgaggtgggcagatcacaaggtcaggggatcgagaccatcctggctaacacagtgaaaccccgtctctactaaaaatacaaaaaattagcagggcatggtggcacatgcctgtaatcccagctactcgggaggctgaggcaggagaatcacttgaacccaggaggcagaggttacagtgagccaagattgcaccactgcactccagcctgggagacagagctcaaaaaacaaaacaaaaacaaacacaaattgctgggcttcaactctagattttctaattcagcaagtctggggtgttgtctgataattagcatttttgataaattcctacacgatgccgatgctgctggtccaaggaccacactttgagaatcactggtctagttgaaatacactataaagcagtggtttccaacctttttggcaccaggcagtggttttacggaagacaatatttccatgatggtggtggggagaatggttttgggatggttcaagcacattacatttattgtgcactttatttctattattacattgtaatatacaatgaaataattatacaactcaccataatgtataatcagtgggagccctcagcttgttttcctgcagctagatggtgccatccgtgggtgatgggagacagtgacagatcatcaggcattagattttcataagaagcctgcaacctagatccctcacatgcacagtttacaatagggtttgtgctcccatgagaatctaacaatgccactgatctgacaggaaaggagctcaggttgtaataggagcaatgaggagcagctataaatacagatgaagctcccttgcatgctggctgctcacctcctgctgtgtggcccagttcctaacaggccatgggctggtactggtccatgtaatgtgctggtactggtccatggcctggggattggggacccctgctgtaaagtatttacttgaaccaggcagtgttctagatctgtgctttttcaaaaaggtaggcagtacctatttaattacaattgattaaaataaaatacattttagtcctttagtagcaccagtcatatttgaagtgttaaacagccacatgtggcttgtagctactgctttggacagggcagatgtagaacactttcatcattgcataaaattttatttggagagtgctacacaaagtgtggtccacagaccaggagcatcagcatcatttgggagcttattagaaatgtaccttctgagcttcttctccattctgaagcagaatctatattttaacaagctctcctgatgattccaatgagcattaaggtttgagaaacagtcttgtaagttgtgcgtgagcacacacacacacacacacgtacacaggtgaatgaatcctcgaagccactaatgcgtacactctttcattatatccattttatagatgagaaaactgagcttagaaaggttagtgagtttttcagtatctcacagctacttagcttgggactcagcccaggtctctctaaatccaaagcccatatactcaaccataggcccagtgcagggaaatcagagggccaaagctagggcaatttctcatccccctgaccctctgtgtccggcttgcagaggagggcatcagcgcagggacagagcttcggagcccatgcgaatgcgaaagcctcgtggagttccagggccgcacgctgggggcgctcgagagcctgacgctgaaccatatcctttggggctggtggcgcgggctggagggaaagtgaagggacctcggcgaaccccaacggcctccttaaccgctcactggcccagctgacggcgcgcctggaggatctggagaaccagctggccaaccagaagtgagggccacggacggcccagacccgggctggggcgcggcaccacggacggtgccccttgcgcgccatcggtgcgccggggccaggcagaacctgggcccgtccggcttgggctgtcggggcggaggcgctggcgggcttccggcattgagctgagttggcctcgcccggaccattaggcggactgcggcgtcagggggatagcgggtggtgagggaaggggcacgtgctagaccggcacgccctcgccgcgtgctgcgctcagttctttgttggatttcttgtttgtgttcttaaaaaaataaaaaaaactgatttccacggg

SEQ ID NO: 42 - protein, 581 aa, Homo sapiens
MRGLLCWPVLLLLLQPWETQLQLTGPRCHTGPLDLVFVIDSSRSVRPFEFETMRQFLMGLLRGLNVGPNATRVGVIQYSSQVQSVFPLRAFSRREDMERAIRDLVPLAQGTMTGLAIQYAMNVAFSVAEGARPPEERVPRVAVIVTDGRPQDRVAEVAAQARARGIEIYAVGVQRADVGSLRAMASPPLDEHVFLVESFDLIQEFGLQFQSRLCAIDLCAEGTHGCEHHCVNSPGSYFCHCQVGFVLQQDQRSCRAIDYCSFGNHSCQHECVSTPGGPRCHCREGHDLQPDGRSCQVRDLCNGVDHGCEFQCVSEGLSYRCLCPEGRQLQADGKSCNRCREGHVDLVLLVDGSKSVRPQNFELVKRFVNQIVDFLDVSPEGTRVGLVQFSSRVRTEFPLGRYGTAAEVKQAVLAVEYMERGTMTGLALRHMVEHSFSEAQGARPRALNVPRVGLVFTDGRSQDDISVWAARAKEEGIVMYAVGVGKAVEAELREIASEPAELHVSYAPDFGTMTHLLENLRGSICPEEGISAGTELRSPCECESLVEFQGRTLGALESLTLNLAQLTARLEDLENQLANQK

1. A method for the determination of the aging condition of a subject, comprising
a. providing a cell sample of the subject,
b. determining the expression level of at least one gene, whose expression level is dependent on the aging condition of the subject, and
c. comparing the expression level of the gene with at least one comparison value, wherein the comparison value is the expression level of the respective gene in a control sample.

2. The method according to claim 1, wherein the expression level is gender-independently dependent on the aging condition of the subject.

3. The method according to claim 1, wherein the gene is selected from one or more of the following human genes or a homologous gene thereof: CORIN (SEQ ID NO: 33), SIRT6 (SEQ ID NO: 37), CPT1B (SEQ ID NO: 39), MATN4 (SEQ ID NO: 41), RDH16 (SEQ ID NO: 1), MGC3101 (SEQ ID NO: 3), C9orf112 (SEQ ID NO: 5), STK40 (SEQ ID NO: 7), TOM1L2 (SEQ ID NO: 9), GAMT (SEQ ID NO: 11), MFSD3 (SEQ ID NO: 13), C19orf24 (SEQ ID NO: 15), TRIM33 (SEQ ID NO: 17), LRIG3 (SEQ ID NO: 19), DOCK9 (SEQ ID NO: 21), NLGN2 (SEQ ID NO: 23), B3GALT3 (SEQ ID NO: 25), FZD7 (SEQ ID NO: 27), TUBAL3 (SEQ ID NO: 29), MMP27 (SEQ ID NO: 31) and PPARD (SEQ ID NO: 35).

4. The method according to claim 1, wherein the gene is selected from one or more of the following human genes or a homologous gene thereof: CORIN (SEQ ID NO: 33), RDH16 (SEQ ID NO: 1), MGC3101 (SEQ ID NO: 3), C9orf112 (SEQ ID NO: 5), STK40 (SEQ ID NO: 7), TOM1L2 (SEQ ID NO: 9), GAMT (SEQ ID NO: 11), MFSD3 (SEQ ID NO: 13), C19orf24 (SEQ ID NO: 15), TRIM33 (SEQ ID NO: 17), LRIG3 (SEQ ID NO: 19), DOCK9 (SEQ ID NO: 21), NLGN2 (SEQ ID NO: 23), B3GALT3 (SEQ ID NO: 25), FZD7 (SEQ ID NO: 27), TUBAL3 (SEQ ID NO: 29), MMP27 (SEQ ID NO: 31) and PPARD (SEQ ID NO: 35).

5. The method according to claim 1, wherein the gene is selected from one or more of the following human genes or a homologous gene thereof: C9orf112 (SEQ ID NO: 5), STK40 (SEQ ID NO: 7), TOM1L2 (SEQ ID NO: 9), GAMT (SEQ ID NO: 11), MFSD3 (SEQ ID NO: 13), C19orf24 (SEQ ID NO: 15), TRIM33 (SEQ ID NO: 17), LRIG3 (SEQ ID NO: 19), DOCK9 (SEQ ID NO: 21), NLGN2 (SEQ ID NO: 23), B3GALT3 (SEQ ID NO: 25) and FZD7 (SEQ ID NO: 27).

6. The method according to claim 1, wherein the cell sample is a skin sample, a mucous membrane sample, a smear cell sample, a blood sample, a urine sample or a stool sample.

7. The method according to claim 1, wherein the cell sample is a sample from a dead organism.

8. The method according to claim 1, wherein the expression level is determined at an RNA-level or at a protein-level.

9. The method according to claim 1, wherein the subject is a mammal.

10. The method according to claim 1, wherein the cell sample comprises cells from cell-culture.

11. A device for the determination of the aging condition of a subject, particularly a chip or array, comprising
a. a carrier material
b. biological molecules being immobilized on the carrier material at precisely defined positions.

12. The device according to claim 11, wherein the biological molecules comprise DNA molecules having a linear sequence of at least 12 nucleotides, and the nucleotide sequence is selected from the sequence of one of said genes in claim 3.

13. The device according to claim 10, wherein the biological molecules comprise DNA molecules having a linear sequence of at least 12 nucleotides, and the nucleotide sequence is selected from the sequence of one of said genes in claim 4 or 5.

14. The device according to claim 10, wherein the biological molecules are antibodies, which specifically recognize at least one epitope on at least one of the proteins encoded by said genes in claim 3.

15. The device according to claim 10, wherein the biological molecules are antibodies, which specifically recognize at least one epitope on at least one of the proteins encoded by one of said genes in claim 4.
